(19) United States
(12) Patent Application Publication
(10) Pub. No.: US 2024/0247273 A1
(43) Pub. Date: Jul. 25, 2024

(54) THERAPEUTIC OLIGONUCLEOTIDES

(71) Applicant: Caris Science, Inc., Irving, TX (US)

(72) Inventors: Heather O'Neill, Mesa, AZ (US); Mark Miglarese, Phoenix, AZ (US); David Spetzler, Paradise Valley, AZ (US)

(21) Appl. No.: 18/531,328

(22) Filed: Dec. 6, 2023

Related U.S. Application Data
(63) Continuation of application No. 17/377,046, filed on Jul. 15, 2021, now abandoned.
Application No. 17/377,046 is a continuation of application No. 16/783,412, filed on Feb. 6, 2020, now Pat. No. 11,091,765.
Application No. 16/783,412 is a continuation of application No. 15/738,564, filed on Dec. 20, 2017, now Pat. No. 10,590,425.
(60) Provisional application No. 62/305,536, filed on Mar. 9, 2016.
(60) Provisional application No. 62/269,671, filed on Dec. 18, 2015.
(60) Provisional application No. 62/239,226, filed on Oct. 8, 2015.
(60) Provisional application No. 62/220,652, filed on Sep. 18, 2015.
(60) Provisional application No. 62/198,110, filed on Jul. 28, 2015.
(60) Provisional application No. 62/186,242, filed on Jun. 29, 2015.

(51) Int. Cl. C12N 15/115; A61K 31/711; A61K 47/68; G01N 33/53

(52) U.S. Cl. CPC C12N 15/115; A61K 31/711; A61K 47/6807; G01N 33/53; C12N 2310/16; C12N 2310/3513; C12N 2320/10; G01N 2333/4716; G01N 2333/70503; Y02A 50/30

(57) ABSTRACT

Methods and compositions are provided for oligonucleotides that bind targets of interest. The targets include cells and microvesicles, such as those derived from various diseases. The oligonucleotides can be used for diagnostic and therapeutic purposes. The target of the oligonucleotides can be a therapeutic target such as Complement Component 1, Q Subcomponent (C1q) or a subunit thereof.

### CROSS REFERENCE

[0001] This application is a continuation U.S. patent application Ser. No. 17/377,046, filed Jul. 15, 2021, which is a continuation of U.S. patent application Ser. No. 16/783,412, now U.S. Pat. No. 11,091,765, filed Feb. 6, 2020, which is a continuation of U.S. patent application Ser. No. 15/738,564, now U.S. Pat. No. 10,590,425, filed Dec. 20, 2017, which is a national Phase Application under 371 of PCT Patent Application No. PCT/US2016/040157, filed Jun. 29, 2016, which claims the benefit of U.S. Provisional Patent Application Nos. 62/186,242, filed Jun. 29, 2015; 62/198,110, filed Jul. 28, 2015; 62/220,652, filed Sep. 18, 2015; 62/239,226, filed Oct. 8, 2015; 62/269,671, filed Dec. 18, 2015; and 62/305,536, filed Mar. 9, 2016; all of which applications are incorporated herein by reference in their entirety. This application is related to International Patent Application No. PCT/US2016/021632, filed Mar. 9, 2016, which application is incorporated herein by reference in its entirety.

### SEQUENCE LISTING SUBMITTED VIA ELECTRONIC FILING SYSTEM

[0002] The instant application contains a Sequence Listing which has been filed electronically in XML format and is hereby incorporated by reference in its entirety. Said XML copy, created on Mar. 5, 2024, is named 110618-0825USC3-1416565_SL.xml and is 5,719,984 bytes in size.

### BACKGROUND OF THE INVENTION

[0003] The invention relates generally to the field of aptamers capable of binding to microvesicle surface antigens, which are useful as therapeutics in and diagnostics of cancer and/or other diseases or disorders in which microvesicles implicated. The invention further relates to materials and methods for the administration of aptamers capable of binding to microvesicles. The microvesicles may be derived from cells indicative of cancer, including without limitation a breast cancer.

[0004] Aptamers are oligomeric nucleic acid molecules having specific binding affinity to molecules, which may be through interactions other than classic Watson-Crick base pairing. Unless otherwise specified, an “aptamer” as the term is used herein can refer to nucleic acid molecules that can be used to characterize a phenotype, regardless of manner of target recognition. Unless other specified, the terms “aptamer,” “oligonucleotide,” “polynucleotide,” or the like may be used interchangeably herein.

[0005] Aptamers, like peptides generated by phage display or monoclonal antibodies (“mAbs”), are capable of specifically binding to selected targets and modulating the target's activity, e.g., through binding aptamers may block their target's ability to function. Created by an in vitro selection process from pools of random sequence oligonucleotides, aptamers have been generated for over 100 proteins including growth factors, transcription factors, enzymes, immunoglobulins, and receptors. A typical aptamer is 10-15 kDa in size (30-45 nucleotides), binds its target with sub-nanomolar affinity, and discriminates against closely related targets (e.g., aptamers will typically not bind other proteins from the same gene family). A series of structural studies have shown that aptamers are capable of using the same types of binding interactions (e.g., hydrogen bonding, electrostatic complementarity, hydrophobic contacts, steric exclusion) that drive affinity and specificity in antibody-antigen complexes.

[0006] Aptamers have a number of desirable characteristics for use as therapeutics and diagnostics including high specificity and affinity, biological efficacy, and excellent pharmacokinetic properties. In addition, they offer specific competitive advantages over antibodies and other protein biologics, for example:

[0007] Speed and control. Aptamers are produced by an entirely in vitro process, allowing for the rapid generation of initial leads, including therapeutic leads. In vitro selection allows the specificity and affinity of the aptamer to be tightly controlled and allows the generation of leads, including leads against both toxic and non-immunogenic targets.

[0008] Toxicity and Immunogenicity. Aptamers as a class have demonstrated little or no toxicity or immunogenicity. In chronic dosing of rats or woodchucks with high levels of aptamer (10 mg/kg daily for 90 days), no toxicity is observed by any clinical, cellular, or biochemical measure. Whereas the efficacy of many monoclonal antibodies can be severely limited by immune response to antibodies themselves, it is extremely difficult to elicit antibodies to aptamers most likely because aptamers cannot be presented by T-cells via the MHC and the immune response is generally trained not to recognize nucleic acid fragments.

[0009] Administration. Whereas most currently approved antibody therapeutics are administered by intravenous infusion (typically over 2-4 hours), aptamers can be administered by subcutaneous injection (aptamer bioavailability via subcutaneous administration is >80% in monkey studies (Tucker et al., J. Chromatography B. 732: 203-212, 1999)). This difference is primarily due to the comparatively low solubility and thus large volumes necessary for most therapeutic mAbs. With good solubility (>150 mg/mL) and comparatively low molecular weight (aptamer: 10-50 kDa; antibody: 150 kDa), a weekly dose of aptamer may be delivered by injection in a volume of less than 0.5 mL. In addition, the small size of aptamers allows them to penetrate into areas of conformational constrictions that do not allow for antibodies or antibody fragments to penetrate, presenting yet another advantage of aptamer-based therapeutics or prophylaxis.

[0010] Scalability and cost. Aptamers are chemically synthesized and are readily scaled as needed to meet production demand for diagnostic or therapeutic applications. Whereas difficulties in scaling production are currently limiting the availability of some biologics and the capital cost of a large-scale protein production plant is enormous, a single large-scale oligonucleotide synthesizer can produce upwards of 100 kg/year and requires a relatively modest initial investment. The current cost of goods for aptamer synthesis at the kilogram scale is estimated at $100/g, comparable to that for highly optimized antibodies.

[0011] Stability. Aptamers are chemically robust. They are intrinsically adapted to regain activity following exposure to factors such as heat and denaturants and can be stored for extended periods (>1 yr) at room temperature as lyophilized powders.

### INCORPORATION BY REFERENCE

[0012] All publications, patents and patent applications mentioned in this specification are herein incorporated by reference to the same extent as if each individual publication, patent or patent application was specifically and individually indicated to be incorporated by reference.

### SUMMARY OF THE INVENTION

[0013] Compositions and methods of the invention provide aptamers that bind biomarkers of interest such as microvesicle surface antigens or functional fragments of microvesicle surface antigens. In various embodiments, oligonucleotide probes of the invention are used in diagnostic, prognostic or theranostic processes to screen a biological sample for the presence or levels of biomarkers, including without limitation microvesicle surface antigens, determined to provide a relevant readout. The diagnosis may be related to a disease or disorder, e.g., a cancer. In other embodiments, oligonucleotide probes of the invention are chemically modified or composed in a pharmaceutical composition for therapeutic applications.

[0014] In an aspect, the invention provides an oligonucleotide comprising a sequence selected from any one of SEQ ID NOs. 1472, 1475, 1477, 1482, and 4152-4325. In a related aspect, the invention provides an oligonucleotide comprising a central sequence comprising a sequence according to any one of SEQ ID NOs. 1472, 1475, 1477, 1482, and 4152-4325, and a 5′ region with sequence 5′-CTAGCATGACTGCAGTACGT (SEQ ID NO. 131), a 3′ region with sequence 5′-CTGTCTCTTATACACATCTGACGCTGCCGACGA (SEQ ID NO. 132), or both. The oligonucleotides of the invention can be capable of binding to complement protein complex C1q or a subunit thereof.

[0015] In another aspect, the invention provides an oligonucleotide comprising the sequence 5′-ACAATCC, wherein the oligonucleotide is capable of binding to complement protein complex C1q or a subunit thereof. In still another aspect, the invention further provides an oligonucleotide comprising the sequence 5′-ACTATAGAACAATCCACCGCTTTAAATCAACTATCTTA (SEQ ID NO. 1472) or 5′-AACCCAATTCACATACACTCTCACCCCCACTAAACA (SEQ ID NO. 1482), wherein the oligonucleotide is capable of binding to complement protein complex C1q or a subunit thereof.

[0016] The C1q subunit targeted by the oligonucleotides of the invention can be the A, B or C subunit. The subunits can carry various post-translational modifications. For example, the C1q A subunit can have at least one modification selected from Table 46.

[0017] The invention further provides an oligonucleotide comprising a nucleic acid sequence or a portion thereof that is at least 50, 55, 60, 65, 70, 75, 80, 85, 86, 86, 88, 89, 90, 95, 96, 97, 98, 99 or 100 percent homologous to an oligonucleotide sequence described above.

[0018] In another aspect, the plurality of oligonucleotides comprising at least 1, 2, 3, 4, 5, 6, 7, 8, 9, 10, 11, 12, 13, 14, 15, 16, 17, 18, 19, 20, 25, 30, 40, 45, 50, 55, 60, 65, 70, 75, 80, 85, 90, 95, 100, 110, 120, 130, 140, 150, 160, 170 or all oligonucleotide sequences described above. For example, the invention provides a plurality of oligonucleotides comprising at least 1, 2, 3, 4, 5, 6, 7, 8, 9, 10, 11, 12, 13, 14, 15, 16, 17, 18, 19, 20, 25, 30, 40, 45, 50, 55, 60, 65, 70, 75, 80, 85, 90, 95, 100, 125, 150, 175, 200, 300, 400, 500, 600, 700, 800, 900, 1000, 2000, 3000, 4000, 5000, 6000, 7000, 8000, 9000, or at least 10000 different oligonucleotide sequences comprising at least one of the sequences 5′-ACAATCC, 5′-ACTATAGAACAATCCACCGCTTTAAATCAACTATCTTA (SEQ ID NO. 1472) or 5′-AACCCAATTCACATACACTCTCACCCCCACTAAACA (SEQ ID NO. 1482), wherein the oligonucleotide are capable of binding C1q or a subunit thereof.

[0019] The oligonucleotide or the plurality of oligonucleotides provided by the invention comprises at least one of DNA, RNA, PNA, and any combination thereof. The oligonucleotide or the plurality of oligonucleotides may comprise at least one functional modification selected from the group consisting of biotinylation, a non-naturally occurring nucleotide, a deletion, an insertion, an addition, and a chemical modification. In some embodiments, the chemical modification comprises at least one of C18, polyethylene glycol (PEG), PEG4, PEG6, PEG8, and PEG12.

[0020] In an aspect, the invention provides a method comprising synthesizing the at least one oligonucleotide or the plurality of oligonucleotides provided by the invention.

[0021] In another aspect, the invention provides a method comprising contacting a biological sample with the at least one oligonucleotide or the plurality of oligonucleotides provided by the invention. For example, the at least one oligonucleotide or the plurality of oligonucleotides can be as described above. In some embodiments, the method further comprises detecting a presence or level of complement protein complex C1q or a subunit thereof in the biological sample that is bound by the at least one oligonucleotide or at least one member of the plurality of oligonucleotides. Any appropriate method of the detecting the complex can be used. For example, detecting the oligonucleotide/s or other nucleic acids may comprise at least one of sequencing, amplification, hybridization, gel electrophoresis, chromatography, and any combination thereof. Any useful sequencing method can be employed, including without limitation at least one of next generation sequencing, dye termination sequencing, pyrosequencing, and any combination thereof. Detecting the C1q protein, a subunit, or a related protein (such as a protein in complex with C1q) may comprise one or more of an immunoassay, enzyme immunoassay (EIA), enzyme-linked immunosorbent assay (ELISA), enzyme-linked oligonucleotide assay (ELONA), affinity isolation, immunoprecipitation, Western blot, gel electrophoresis, or flow cytometry. One of skill will appreciate that immunoassays can employ various useful reporter systems, including without limitation enzymes, radioactive isotopes, nucleic acid reporters, fluorogenic reporters, electrochemiluminescent tags, or label-free formats.

[0022] C1q may be free in solution or part of a larger biological complex. In some cases, the C1q or subunit thereof may be associated with a microvesicle population. As desired, the method of the invention comprises isolating the microvesicle population prior to contacting the sample with the oligonucleotide or plurality of oligonucleotides, after such contacting, or both before and after. The isolating may be in whole or in part. For example, the microvesicle population may be partially isolated from other components in the sample before or after contacting the sample with the oligonucleotide or plurality of oligonucleotides. The invention may use any appropriate techniques to isolate microvesicles. Various techniques of isolating microvesicles are disclosed herein or known in the art, including without limitation affinity purification, filtration, concentration, polymer precipitation, PEG precipitation, ultracentrifugation, a molecular crowding reagent, affinity selection, chromatography, or any combination thereof.

[0023] Any desired biological sample can be contacted with the oligonucleotide or plurality of oligonucleotides according to the invention. In various embodiments, the sample comprises a bodily fluid, tissue sample or cell culture. Any appropriate bodily fluid can be contacted, including without limitation whole blood, peripheral blood, sera, plasma, ascites, urine, cerebrospinal fluid (CSF), sputum, saliva, bone marrow, synovial fluid, aqueous humor, amniotic fluid, cerumen, breast milk, broncheoalveolar lavage fluid, semen, prostatic fluid, cowper's fluid or pre-ejaculatory fluid, female ejaculate, sweat, fecal matter, hair oil, tears, cyst fluid, pleural and peritoneal fluid, pericardial fluid, lymph, chyme, chyle, bile, interstitial fluid, menses, pus, sebum, vomit, vaginal secretions, mucosal secretion, stool water, pancreatic juice, lavage fluids from sinus cavities, bronchopulmonary aspirates, blastocyl cavity fluid, or umbilical cord blood. In certain preferred embodiments, the bodily fluid comprises whole blood or a derivative or fraction thereof, such as sera or plasma. The biological sample may comprise purified C1q, recombinant C1q, both, or fragments thereof. For example, such C1q or subunits thereof can be spiked into the bodily fluid, tissue sample or cell culture sample.

[0024] As desired, the method of detecting the presence or level of complement protein complex C1q or a subunit thereof may be used to characterize a phenotype. The phenotype can be any appropriate phenotype, including without limitation a disease or disorder. In such cases, the characterizing may include providing, or assisting in providing, at least one of diagnostic, prognostic and theranostic information for the disease or disorder. Characterizing the phenotype may comprise comparing the presence or level to a reference. Any appropriate reference level can be used. For example, the reference can be the presence or level determined in a sample from at least one individual without the phenotype or from at least one individual with a different phenotype. As a further example, if the phenotype is a disease or disorder, the reference level may be the presence or level determined in a sample from at least one individual without the disease or disorder, or with a different state of the disease or disorder (e.g., in remission, different stage or grade, different prognosis, metastatic versus local, etc).

[0025] As noted, the sample can be from a subject suspected of having or being predisposed to a disease or disorder. The disease or disorder can be any disease or disorder that can be assessed by the subject method. For example, the disease or disorder may be a cancer, a premalignant condition, an inflammatory disease, an immune disease, an autoimmune disease or disorder, a pregnancy related disorder, a cardiovascular disease or disorder, a neurological disease or disorder, an infectious disease or pain. In an embodiment, the cancer comprises an acute lymphoblastic leukemia; acute myeloid leukemia; adrenocortical carcinoma; AIDS-related cancers; AIDS-related lymphoma; anal cancer; appendix cancer; astrocytomas; atypical teratoid/rhabdoid tumor; basal cell carcinoma; bladder cancer; brain stem glioma; brain tumor (including brain stem glioma, central nervous system atypical teratoid/rhabdoid tumor, central nervous system embryonal tumors, astrocytomas, craniopharyngioma, ependymoblastoma, ependymoma, medulloblastoma, medulloepithelioma, pineal parenchymal tumors of intermediate differentiation, supratentorial primitive neuroectodermal tumors and pineoblastoma); breast cancer; bronchial tumors; Burkitt lymphoma; cancer of unknown primary site; carcinoid tumor; carcinoma of unknown primary site; central nervous system atypical teratoid/rhabdoid tumor; central nervous system embryonal tumors; cervical cancer; childhood cancers; chordoma; chronic lymphocytic leukemia; chronic myelogenous leukemia; chronic myeloproliferative disorders; colon cancer; colorectal cancer; craniopharyngioma; cutaneous T-cell lymphoma; endocrine pancreas islet cell tumors; endometrial cancer; ependymoblastoma; ependymoma; esophageal cancer; esthesioneuroblastoma; Ewing sarcoma; extracranial germ cell tumor; extragonadal germ cell tumor; extrahepatic bile duct cancer; gallbladder cancer; gastric (stomach) cancer; gastrointestinal carcinoid tumor; gastrointestinal stromal cell tumor; gastrointestinal stromal tumor (GIST); gestational trophoblastic tumor; glioma; hairy cell leukemia; head and neck cancer; heart cancer; Hodgkin lymphoma; hypopharyngeal cancer; intraocular melanoma; islet cell tumors; Kaposi sarcoma; kidney cancer; Langerhans cell histiocytosis; laryngeal cancer; lip cancer; liver cancer; lung cancer; malignant fibrous histiocytoma bone cancer; medulloblastoma; medulloepithelioma; melanoma; Merkel cell carcinoma; Merkel cell skin carcinoma; mesothelioma; metastatic squamous neck cancer with occult primary; mouth cancer; multiple endocrine neoplasia syndromes; multiple myeloma; multiple myeloma/plasma cell neoplasm; mycosis fungoides; myelodysplastic syndromes; myeloproliferative neoplasms; nasal cavity cancer; nasopharyngeal cancer; neuroblastoma; Non-Hodgkin lymphoma; nonmelanoma skin cancer; non-small cell lung cancer; oral cancer; oral cavity cancer; oropharyngeal cancer; osteosarcoma; other brain and spinal cord tumors; ovarian cancer; ovarian epithelial cancer; ovarian germ cell tumor; ovarian low malignant potential tumor; pancreatic cancer; papillomatosis; paranasal sinus cancer; parathyroid cancer; pelvic cancer; penile cancer; pharyngeal cancer; pineal parenchymal tumors of intermediate differentiation; pineoblastoma; pituitary tumor; plasma cell neoplasm/multiple myeloma; pleuropulmonary blastoma; primary central nervous system (CNS) lymphoma; primary hepatocellular liver cancer; prostate cancer; rectal cancer; renal cancer; renal cell (kidney) cancer; renal cell cancer; respiratory tract cancer; retinoblastoma; rhabdomyosarcoma; salivary gland cancer; Sézary syndrome; small cell lung cancer; small intestine cancer; soft tissue sarcoma; squamous cell carcinoma; squamous neck cancer; stomach (gastric) cancer; supratentorial primitive neuroectodermal tumors; T-cell lymphoma; testicular cancer; throat cancer; thymic carcinoma; thymoma; thyroid cancer; transitional cell cancer; transitional cell cancer of the renal pelvis and ureter; trophoblastic tumor; ureter cancer; urethral cancer; uterine cancer; uterine sarcoma; vaginal cancer; vulvar cancer; Waldenström macroglobulinemia; or Wilm's tumor. The premalignant condition can be Barrett's Esophagus. The autoimmune disease can be inflammatory bowel disease (IBD), Crohn's disease (CD), ulcerative colitis (UC), pelvic inflammation, vasculitis, psoriasis, diabetes, autoimmune hepatitis, multiple sclerosis, myasthenia gravis, Type I diabetes, rheumatoid arthritis, psoriasis, systemic lupus erythematosis (SLE), Hashimoto's Thyroiditis, Grave's disease, Ankylosing Spondylitis Sjogrens Disease, CREST syndrome, Scleroderma, Rheumatic Disease, organ rejection, Primary Sclerosing Cholangitis, or sepsis. The cardiovascular disease can be atherosclerosis, congestive heart failure, vulnerable plaque, stroke, ischemia, high blood pressure, stenosis, vessel occlusion or a thrombotic event. The neurological disease can be Multiple Sclerosis (MS), Parkinson's Disease (PD), Alzheimer's Disease (AD), schizophrenia, bipolar disorder, depression, autism, Prion Disease, Pick's disease, dementia, Huntington disease (HD), Down syndrome, cerebrovascular disease, Rasmussen's encephalitis, viral meningitis, neurospsychiatric systemic lupus erythematosus (NPSLE), amyotrophic lateral sclerosis, Creutzfeldt-Jacob disease, Gerstmann-Straussler-Scheinker disease, transmissible spongiform encephalopathy, ischemic reperfusion damage (e.g. stroke), brain trauma, microbial infection, or chronic fatigue syndrome. The pain can be fibromyalgia, chronic neuropathic pain, or peripheral neuropathic pain. The infectious disease can be a bacterial infection, viral infection, yeast infection, Whipple's Disease, Prion Disease, cirrhosis, methicillin-resistant Staphylococcus aureus, HIV, HCV, hepatitis, syphilis, meningitis, malaria, tuberculosis, influenza.

[0026] As further described herein, the invention provides a kit comprising a reagent for carrying out the method. Similarly, the invention provides for the use of a reagent for carrying out the method. The reagent can be any useful reagent for carrying out the method. For example, the reagent can be at least one oligonucleotide or a plurality of oligonucleotides as described above, or one or more primers or primer sets for amplification or sequencing of such oligonucleotides. In some embodiments, the reagent comprises at least one binding agent to at least one protein, a binding buffer with or without MgCl₂, a sample processing reagent, a microvesicle isolation reagent, a detection reagent, a secondary detection reagent, a wash buffer, an elution buffer, a solid support, and any combination thereof. The microvesicle isolation reagent may comprise at least one of a concentrator unit, a filtration unit, a polymer, PEG, a size exclusion column, a binding agent to a microvesicle antigen, and any combination thereof; and/or the detection or secondary detection agent comprises streptavidin-horse radish peroxide (HRP), a streptavidin-conjugated fluorophore, a streptavidin-conjugated quantum dot, and any combination thereof.

[0027] In an aspect, the invention provides a pharmaceutical composition comprising a therapeutically effective amount of the at least one oligonucleotide or the plurality of oligonucleotides of the invention, or a salt thereof, and a pharmaceutically acceptable carrier, diluent, or both. In a related aspect, the invention provides a method of treating or ameliorating a disease or disorder in a subject in need thereof, comprising administering such pharmaceutical composition to the subject. In another related aspect, the invention provides a method of inhibiting C1q in a subject, comprising administering such pharmaceutical composition to the subject. The pharmaceutical composition can be administered in any useful format. In various embodiments, the administering comprises at least one of intradermal, intramuscular, intraperitoneal, intravenous, subcutaneous, intranasal, epidural, oral, sublingual, intracerebral, intravaginal, transdermal, rectal, by inhalation, topical administration, or any combination thereof. The carrier or diluent can be any useful carrier or diluent, as described herein or known in the art.

[0028] In an aspect, the invention provides a multipartite construct that comprises a first segment that binds to a first target and a second segment that binds to a second target. As desired, the first segment, the second segment, or both, comprises a sequence selected from any one of SEQ ID NOs. 137-969 and 1072-4325, or a region that is at least 50, 55, 60, 65, 70, 75, 80, 85, 90, 95, 96, 97, 98, 99 or 100 percent homologous thereto.

[0029] In a preferred embodiment, the first target comprises a cell-of-origin or disease specific cellular marker, including without limitation a protein marker that may be found on a cellular surface. For example, the first target can be a cancer antigen, a tumor antigen, a cell surface antigen, a microvesicle surface antigen, a cell receptor and/or a membrane antigen. Many useful targets are provided herein. In some embodiments, the first target is selected from any one of Table 3, Table 4, Tables 18-26, or Table 45. The first target can be selected from those provided in the Section “Anti-target and multivalent oligonucleotides” herein. For example, the first target can be selected from the group consisting of CD2, CD4, CD19, CD20, CD22, CD23, CD30, CD33, CD37, CD40, CD44v6, CD52, CD56, CD70, CD74, CD79a, CD80, CD98, CD138, EGFR (Epidermal growth factor receptor), VEGF (Vascular endothelial growth factor), VEGFR1 (Vascular endothelial growth factor receptor 1), PDGFR (Platelet-derived growth factor receptor), RANKL (Receptor activator of nuclear factor kappa-B ligand), GPNMB (Transmembrane glycoprotein Neuromedin B), EphA2 (Ephrin type-A receptor 2), PSMA (Prostate-specific membrane antigen), Cripto (Cryptic family protein 1B), EpCAM (Epithelial cell adhesion molecule), CTLA4 (Cytotoxic T-Lymphocyte Antigen 4), IGF-IR (Type 1 insulin-like growth factor receptor), GP3 (M13 bacteriophage), GP9 (Glycoprotein IX), CD42a, GP 40 (Glycoprotein 40 kDa), GPC3 (glypican-3), GPC1 (glypican-1), TRAILR1 (Tumor necrosis factor-related apoptosis-inducing ligand receptor 1), TRAILR1 (Tumor necrosis factor-related apoptosis-inducing ligand receptor II), FAS (Type II transmembrane protein), PS (phosphatidyl serine) lipid, Muc1 (Mucin 1, PEM), Muc18, CD146, α5β1 integrin, α4β1 integrin, αv integrin (Vitronectin Receptor), Chondrolectin, CAIX (Carbonic anhydrase IX), GD2 gangloside, GD3 gangloside, GM1 gangloside, Lewis Y antigen, Mesothelin, HER2 (Human Epidermal Growth factor 2), HER3, HER4, FN14 (Fibroblast Growth Factor Inducible 14), CS1 (Cell surface glycoprotein, CD2 subset 1, CRACC, SLAMF7, CD319), 41BB CD137, SIP (Siah-1 Interacting Protein), CTGF (Connective tissue growth factor), HLADR (MHC class II cell surface receptor), PD-1 (Programmed Death 1, Type I membrane protein, PD-L1 (Programmed Death Ligand 1), PD-L2 (Programmed Death Ligand 2), IL-2 (Interleukin-2), IL-8 (Interleukin-8), IL-13 (Interleukin-13), PIGF (Phosphatidylinositol-glycan biosynthesis class F protein), NRP1 (Neuropilin-1), ICAM1, CD54, GC182 (Claudin 18.2), Claudin, HGF (Hepatocyte growth factor), CEA (Carcinoembryonic antigen), LTβR (lymphotoxin P receptor), Kappa Myeloma, Folate Receptor alpha, GRP78 (BIP, 78 kDa Glucose-regulated protein), A33 antigen, PSA (Prostate-specific antigen), CA 125 (Cancer antigen 125 or carbohydrate antigen 125), CA19.9, CA15.3, CA242, leptin, prolactin, osteopontin, IGF-II (Insulin-like growth factor 2), fascin, sPIgR (secreted chain of polymorphic immunoglobulin receptor), 14-3-3 eta protein, 5T4, ETA (epithelial tumor antigen), MAGE (Melanoma-associated antigen), MAPG (Melanoma-associated proteoglycan, NG2), vimentin, EPCA-1 (Early prostate cancer antigen-2), TAG-72 (Tumor-associated glycoprotein 72), factor VIII, Neprilysin (Membrane metallo-endopeptidase), 17-1 A (Epithelial cell surface antigen 17-1A), nucleolin, nucleophosmin, and any combination thereof. In some embodiments, the first target comprises CD20. In still other embodiments, the first target comprises cMet.

[0030] As described herein, the invention contemplates various configuration of the multipartite construct. See, e.g., FIGS. 23A-D herein and related discussion herein. In preferred embodiments, the first segment comprises an oligonucleotide. Such construct may further comprise a first oligonucleotide primer region and/or a second oligonucleotide primer region surrounding the first segment.

[0031] In some embodiments, the second target of the multipartite construct of the invention comprises an immunomodulatory molecule. For example, the immunomodulatory molecule may be selected from at least one of a member of the innate immune system, a member of the complement system, C1q, C1r, C1s, C1, C3a, C3b, C3d, C5a, C2, C4, and any combination thereof. In some embodiments, the second target comprises C1q or a subunit thereof, e.g., the A, B or C subunit. The second target may comprise any number of post-translational modifications. For example, when the immunomodulatory molecule comprises C1q A, the A subunit may have at least one modification selected from Table 46.

[0032] As noted above, the invention contemplates various configuration of the multipartite construct. In various embodiments of the invention, the second segment comprises an antibody or oligonucleotide. And in preferred embodiments, the second segment comprises an oligonucleotide. Such a second segment may further comprise a first oligonucleotide primer region and/or a second oligonucleotide primer region surrounding the second segment. The second segment may comprise an oligonucleotide as provided by the invention. For example, the oligonucleotide can be as described above, including without limitation a sequence selected from any one of SEQ ID NOs. 137-969 and 1072-4325, or a region that is at least 50, 55, 60, 65, 70, 75, 80, 85, 90, 95, 96, 97, 98, 99 or 100 percent homologous thereto.

[0033] As desired, the multipartite construct of the invention can include a linker region between the first segment and second segment. The linker region can be chosen to achieve any desired purpose, such as modulate the distance between the first and second targets, e.g., to relieve steric hindrance or to bring the targets into close proximity. The linker can also provide certain functionalities, including without limitation an immunostimulatory sequence, an anti-proliferative sequence, a pro-apoptotic sequence, or some combination thereof. In an embodiment, the linker region comprises one or more CpG motif. In another embodiment, the linker comprises a polyG sequence. In still other embodiments, the multipartite construct of the invention comprises an immunostimulating moiety, a membrane disruptive moiety, or both.

[0034] The multipartite construct of the invention can be modified to comprise at least one oligonucleotide chemical modification. Various useful modifications are disclosed herein or known in the art. In some embodiments, the modification is selected from the group consisting: of a chemical substitution at a sugar position; a chemical substitution at a phosphate position; a chemical substitution at a base position of the nucleic acid; and any combination thereof. The modification can be selected from the group consisting of: incorporation of a modified nucleotide, 3′ capping, conjugation to an amine linker, conjugation to a high molecular weight, non-immunogenic compound, conjugation to a lipophilic compound, conjugation to a drug, conjugation to a cytotoxic moiety, labeling with a radioisotope, and any combination thereof. In a preferred embodiment, the non-immunogenic, high molecular weight compound is polyalkylene glycol, such as polyethylene glycol.

[0035] In preferred embodiments, the multipartite construct comprises an oligonucleotide polymer. Such a construct can be flanked by a first oligonucleotide primer region and a second oligonucleotide primer region. In various embodiments, the first target comprises CD20 or cMET and the second segment comprises an oligonucleotide provided by the invention, e.g., an oligonucleotide that can bind C1q or a subunit thereof.

[0036] In a related aspect, the invention provides a pharmaceutical composition comprising a therapeutically effective amount of the multipartite construct described herein, or a salt thereof, and a pharmaceutically acceptable carrier, diluent or both. In a related aspect, the invention provides a method of treating or ameliorating a disease or disorder in a subject in need thereof, comprising administering such pharmaceutical composition to the subject. The pharmaceutical composition can be administered in any useful format. In various embodiments, the administering comprises at least one of intradermal, intramuscular, intraperitoneal, intravenous, subcutaneous, intranasal, epidural, oral, sublingual, intracerebral, intravaginal, transdermal, rectal, by inhalation, topical administration, or any combination thereof. The carrier or diluent can be any useful carrier or diluent, as described herein or known in the art.

[0037] The first target of the multipartite construct may be determined in a personalized manner. See, e.g., FIG. 23E and related discussion herein. For example, the first target of the multipartite construct can be determined by: a) contacting a biological sample from the subject with an oligonucleotide probe library such as described herein (see, e.g., Examples 16-18, 21-22, and 26-32); b) identifying members of the probe library that bound to the biological sample upon contact in a) (see, e.g., Examples 16-18, 21-22, and 26-32); and c) determining the first target as a binding target of a member of the probe library identified in b) (see, e.g., Examples 9, 23 and 35), thereby providing a personalized medical treatment to the subject. The biological sample may comprise any useful sample from the subject, including without limitation a biopsy sample, a tissue removed during a surgical procedure, a bodily fluid, a frozen section, a cell culture, or a fraction, derivative or components of any thereof. The bodily fluid can be any useful fluid from the subject, including without peripheral blood, sera, plasma, ascites, urine, cerebrospinal fluid (CSF), sputum, saliva, bone marrow, synovial fluid, aqueous humor, amniotic fluid, cerumen, breast milk, broncheoalveolar lavage fluid, semen (including prostatic fluid), Cowper's fluid or pre-ejaculatory fluid, female ejaculate, sweat, fecal matter, tears, cyst fluid, pleural fluid, peritoneal fluid, pericardial fluid, lymph, chyme, chyle, bile, interstitial fluid, menses, pus, sebum, vomit, vaginal secretions, mucosal secretion, stool water, pancreatic juice, lavage fluids from sinus cavities, bronchopulmonary aspirates or other lavage fluids.

[0038] A method of inducing killing of a cell, comprising contacting the cell with a multipartite construct of the invention as provided above. In such a construct, the second segment may comprise an oligonucleotide provided by the invention. For example, the construct may one that binds a member of the complement system, including without limitation the C1 complex, C1q, or a subunit thereof, and can induce complement mediated lysis of the cell. In some embodiments, the cell that is killed comprises a disease or disorder.

[0039] As described above, the multipartite construct of the invention can be administered to a subject to treat a disease or disorder, or to induce cell killing. In various embodiments, the disease or disorder comprises a cancer, a premalignant condition, an inflammatory disease, an immune disease, an autoimmune disease or disorder, a cardiovascular disease or disorder, neurological disease or disorder, infectious disease or pain. The cancer can include without limitation one of acute lymphoblastic leukemia; acute myeloid leukemia; adrenocortical carcinoma; AIDS-related cancers; AIDS-related lymphoma; anal cancer; appendix cancer; astrocytomas; atypical teratoid/rhabdoid tumor; basal cell carcinoma; bladder cancer; brain stem glioma; brain tumor (including brain stem glioma, central nervous system atypical teratoid/rhabdoid tumor, central nervous system embryonal tumors, astrocytomas, craniopharyngioma, ependymoblastoma, ependymoma, medulloblastoma, medulloepithelioma, pineal parenchymal tumors of intermediate differentiation, supratentorial primitive neuroectodermal tumors and pineoblastoma); breast cancer; bronchial tumors; Burkitt lymphoma; cancer of unknown primary site; carcinoid tumor; carcinoma of unknown primary site; central nervous system atypical teratoid/rhabdoid tumor; central nervous system embryonal tumors; cervical cancer; childhood cancers; chordoma; chronic lymphocytic leukemia; chronic myelogenous leukemia; chronic myeloproliferative disorders; colon cancer; colorectal cancer; craniopharyngioma; cutaneous T-cell lymphoma; endocrine pancreas islet cell tumors; endometrial cancer; ependymoblastoma; ependymoma; esophageal cancer; esthesioneuroblastoma; Ewing sarcoma; extracranial germ cell tumor; extragonadal germ cell tumor; extrahepatic bile duct cancer; gallbladder cancer; gastric (stomach) cancer; gastrointestinal carcinoid tumor; gastrointestinal stromal cell tumor; gastrointestinal stromal tumor (GIST); gestational trophoblastic tumor; glioma; hairy cell leukemia; head and neck cancer; heart cancer; Hodgkin lymphoma; hypopharyngeal cancer; intraocular melanoma; islet cell tumors; Kaposi sarcoma; kidney cancer; Langerhans cell histiocytosis; laryngeal cancer; lip cancer; liver cancer; lung cancer; malignant fibrous histiocytoma bone cancer; medulloblastoma; medulloepithelioma; melanoma; Merkel cell carcinoma; Merkel cell skin carcinoma; mesothelioma; metastatic squamous neck cancer with occult primary; mouth cancer; multiple endocrine neoplasia syndromes; multiple myeloma; multiple myeloma/plasma cell neoplasm; mycosis fungoides; myelodysplastic syndromes; myeloproliferative neoplasms; nasal cavity cancer; nasopharyngeal cancer; neuroblastoma; Non-Hodgkin lymphoma; nonmelanoma skin cancer; non-small cell lung cancer; oral cancer; oral cavity cancer; oropharyngeal cancer; osteosarcoma; other brain and spinal cord tumors; ovarian cancer; ovarian epithelial cancer; ovarian germ cell tumor; ovarian low malignant potential tumor; pancreatic cancer; papillomatosis; paranasal sinus cancer; parathyroid cancer; pelvic cancer; penile cancer; pharyngeal cancer; pineal parenchymal tumors of intermediate differentiation; pineoblastoma; pituitary tumor; plasma cell neoplasm/multiple myeloma; pleuropulmonary blastoma; primary central nervous system (CNS) lymphoma; primary hepatocellular liver cancer; prostate cancer; rectal cancer; renal cancer; renal cell (kidney) cancer; renal cell cancer; respiratory tract cancer; retinoblastoma; rhabdomyosarcoma; salivary gland cancer; Sézary syndrome; small cell lung cancer; small intestine cancer; soft tissue sarcoma; squamous cell carcinoma; squamous neck cancer; stomach (gastric) cancer; supratentorial primitive neuroectodermal tumors; T-cell lymphoma; testicular cancer; throat cancer; thymic carcinoma; thymoma; thyroid cancer; transitional cell cancer; transitional cell cancer of the renal pelvis and ureter; trophoblastic tumor; ureter cancer; urethral cancer; uterine cancer; uterine sarcoma; vaginal cancer; vulvar cancer; Waldenström macroglobulinemia; or Wilm's tumor. The premalignant condition can include without limitation Barrett's Esophagus. The autoimmune disease can include without limitation one of inflammatory bowel disease (IBD), Crohn's disease (CD), ulcerative colitis (UC), pelvic inflammation, vasculitis, psoriasis, diabetes, autoimmune hepatitis, multiple sclerosis, myasthenia gravis, Type I diabetes, rheumatoid arthritis, psoriasis, systemic lupus erythematosis (SLE), Hashimoto's Thyroiditis, Grave's disease, Ankylosing Spondylitis Sjogrens Disease, CREST syndrome, Scleroderma, Rheumatic Disease, organ rejection, Primary Sclerosing Cholangitis, or sepsis. The cardiovascular disease can include without limitation one of atherosclerosis, congestive heart failure, vulnerable plaque, stroke, ischemia, high blood pressure, stenosis, vessel occlusion or a thrombotic event. The neurological disease can include without limitation one of Multiple Sclerosis (MS), Parkinson's Disease (PD), Alzheimer's Disease (AD), schizophrenia, bipolar disorder, depression, autism, Prion Disease, Pick's disease, dementia, Huntington disease (HD), Down's syndrome, cerebrovascular disease, Rasmussen's encephalitis, viral meningitis, neurospsychiatric systemic lupus erythematosus (NPSLE), amyotrophic lateral sclerosis, Creutzfeldt-Jacob disease, Gerstmann-Straussler-Scheinker disease, transmissible spongiform encephalopathy, ischemic reperfusion damage (e.g. stroke), brain trauma, microbial infection, or chronic fatigue syndrome. The pain can include without limitation one of fibromyalgia, chronic neuropathic pain, or peripheral neuropathic pain. The infectious disease can include without limitation one of a bacterial infection, viral infection, yeast infection, Whipple's Disease, Prion Disease, cirrhosis, methicillin-resistant Staphylococcus aureus, HIV, HCV, hepatitis, syphilis, meningitis, malaria, tuberculosis, or influenza.

[0040] In an aspect, the invention provides a kit comprising a multipartite construct or a pharmaceutical composition provided by the invention, e.g., as described above. In a related aspect, the invention provides a kit comprising a reagent for carrying out the methods making use of such multipartite construct or a pharmaceutical composition. Similarly, the invention provides use of a reagent for carrying out the methods making use of such multipartite construct or a pharmaceutical composition. The invention also provides use of a reagent for the manufacture of a kit or reagent for carrying out the methods making use of such multipartite construct or a pharmaceutical composition. The invention further contemplates use of a reagent for the manufacture of a medicament for carrying out the method methods making use of such multipartite construct or a pharmaceutical composition. In such kits or uses, the reagent may comprise a multipartite construct or a pharmaceutical composition provided by the invention, e.g., as described above.

[0041] In an aspect, the invention provides a method of detecting at least one microvesicle in a biological sample comprising contacting the biological sample with at least one binding agent to at least one microvesicle surface antigen and detecting the at least one microvesicle recognized by the binding agent to the at least one protein. In an embodiment, the at least one microvesicle surface antigen is selected from any one of Tables 18, 26 or 45. The at least one protein can be a complement protein or an immunoglobulin. For example, the complement protein can be C1q, a subunit thereof (e.g., A, B or C), C4b, or any combination thereof. The immunoglobulin may comprise IgM, IgG, or both. See Example 35 herein. The at least one binding agent may comprise any useful binding agent, including without limitation a nucleic acid, DNA molecule, RNA molecule, antibody, antibody fragment, aptamer, peptoid, zDNA, peptide nucleic acid (PNA), locked nucleic acid (LNA), lectin, peptide, dendrimer, membrane protein labeling agent, chemical compound, or a combination thereof. In some embodiments, the at least one binding agent comprises at least one oligonucleotide, such as an oligonucleotide probe as provided by the invention.

[0042] The at least one binding agent can be used to capture and/or detect the at least one microvesicle. Methods of detecting biomarkers and microvesicle using binding agents are provided herein. See, e.g., FIGS. 2A-B, which figures describe sandwich assay formats. In some embodiments, the at least one binding agent used to capture the at least one microvesicle is bound to a substrate. Any useful substrate can be used, including without limitation a planar array, a column matrix, or a microbead. See, e.g., FIGS. 2A-B. In some embodiments, the at least one binding agent used to detect the at least one microvesicle is labeled. Various useful labels are provided herein or known in the art, including without limitation a magnetic label, a fluorescent moiety, an enzyme, a chemiluminescent probe, a metal particle, a non-metal colloidal particle, a polymeric dye particle, a pigment molecule, a pigment particle, an electrochemically active species, a semiconductor nanocrystal, a nanoparticle, a quantum dot, a gold particle, a fluorophore, or a radioactive label.

[0043] In an embodiment, the detecting is used to characterize a phenotype. The phenotype can be any appropriate phenotype of interest. In some embodiments, the phenotype is a disease or disorder. The characterizing may comprise providing, or assisting in providing, diagnostic, prognostic and/or theranostic information for the disease or disorder. The characterizing may be performed by comparing a presence or level of the at least one microvesicle to a reference. The reference can be selected per the characterizing to be performed. For example, when the phenotype comprises a disease or disorder, the reference may comprise a presence or level of the at least one microvesicle in a sample from an individual or group of individuals without the disease or disorder. The comparing can be determining whether the presence or level of the microvesicle differs from that of the reference. In some embodiments, the detected at least one microvesicle is found at higher levels in a healthy sample as compared to a diseased sample. In another embodiment, the detected at least one microvesicle is found at higher levels in a diseased sample as compared to a healthy sample. When multiplex assays are performed, e.g., using a plurality of binding agents to different biomarkers, some microvesicle antigens may be observed at a higher level in the biological samples as compared to the reference whereas other microvesicle antigens may be observed at a lower level in the biological samples as compared to the reference.

[0044] The method can be used to detect the at least one microvesicle in any appropriate biological sample. For example, the biological sample may comprise a bodily fluid, tissue sample or cell culture. The bodily fluid or tissue sample can be from a subject having or suspected of having a medical condition, a disease or a disorder. Thus, the method can be used to provide a diagnostic, prognostic, or theranostic read out for the subject. Any appropriate bodily fluid can be used, including without limitation peripheral blood, sera, plasma, ascites, urine, cerebrospinal fluid (CSF), sputum, saliva, bone marrow, synovial fluid, aqueous humor, amniotic fluid, cerumen, breast milk, broncheoalveolar lavage fluid, semen, prostatic fluid, cowper's fluid or pre-ejaculatory fluid, female ejaculate, sweat, fecal matter, hair oil, tears, cyst fluid, pleural and peritoneal fluid, pericardial fluid, lymph, chyme, chyle, bile, interstitial fluid, menses, pus, sebum, vomit, vaginal secretions, mucosal secretion, stool water, pancreatic juice, lavage fluids from sinus cavities, bronchopulmonary aspirates, blastocyl cavity fluid, or umbilical cord blood.

[0045] The method of the invention can be used to detect or characterize any appropriate disease or disorder of interest, including without limitation Breast Cancer, Alzheimer's disease, bronchial asthma, Transitional cell carcinoma of the bladder, Giant cellular osteoblastoclastoma, Brain Tumor, Colorectal adenocarcinoma, Chronic obstructive pulmonary disease (COPD), Squamous cell carcinoma of the cervix, acute myocardial infarction (AMI)/acute heart failure, Chron's Disease, diabetes mellitus type II, Esophageal carcinoma, Squamous cell carcinoma of the larynx, Acute and chronic leukemia of the bone marrow, Lung carcinoma, Malignant lymphoma, Multiple Sclerosis, Ovarian carcinoma, Parkinson disease, Prostate adenocarcinoma, psoriasis, Rheumatoid Arthritis, Renal cell carcinoma, Squamous cell carcinoma of skin, Adenocarcinoma of the stomach, carcinoma of the thyroid gland, Testicular cancer, ulcerative colitis, or Uterine adenocarcinoma.

[0046] In some embodiments, the disease or disorder comprises a cancer, a premalignant condition, an inflammatory disease, an immune disease, an autoimmune disease or disorder, a cardiovascular disease or disorder, neurological disease or disorder, infectious disease or pain. The cancer can include without limitation one of acute lymphoblastic leukemia; acute myeloid leukemia; adrenocortical carcinoma; AIDS-related cancers; AIDS-related lymphoma; anal cancer; appendix cancer; astrocytomas; atypical teratoid/rhabdoid tumor; basal cell carcinoma; bladder cancer; brain stem glioma; brain tumor (including brain stem glioma, central nervous system atypical teratoid/rhabdoid tumor, central nervous system embryonal tumors, astrocytomas, craniopharyngioma, ependymoblastoma, ependymoma, medulloblastoma, medulloepithelioma, pineal parenchymal tumors of intermediate differentiation, supratentorial primitive neuroectodermal tumors and pineoblastoma); breast cancer; bronchial tumors; Burkitt lymphoma; cancer of unknown primary site; carcinoid tumor; carcinoma of unknown primary site; central nervous system atypical teratoid/rhabdoid tumor; central nervous system embryonal tumors; cervical cancer; childhood cancers; chordoma; chronic lymphocytic leukemia; chronic myelogenous leukemia; chronic myeloproliferative disorders; colon cancer; colorectal cancer; craniopharyngioma; cutaneous T-cell lymphoma; endocrine pancreas islet cell tumors; endometrial cancer; ependymoblastoma; ependymoma; esophageal cancer; esthesioneuroblastoma; Ewing sarcoma; extracranial germ cell tumor; extragonadal germ cell tumor; extrahepatic bile duct cancer; gallbladder cancer; gastric (stomach) cancer; gastrointestinal carcinoid tumor; gastrointestinal stromal cell tumor; gastrointestinal stromal tumor (GIST); gestational trophoblastic tumor; glioma; hairy cell leukemia; head and neck cancer; heart cancer; Hodgkin lymphoma; hypopharyngeal cancer; intraocular melanoma; islet cell tumors; Kaposi sarcoma; kidney cancer; Langerhans cell histiocytosis; laryngeal cancer; lip cancer; liver cancer; lung cancer; malignant fibrous histiocytoma bone cancer; medulloblastoma; medulloepithelioma; melanoma; Merkel cell carcinoma; Merkel cell skin carcinoma; mesothelioma; metastatic squamous neck cancer with occult primary; mouth cancer; multiple endocrine neoplasia syndromes; multiple myeloma; multiple myeloma/plasma cell neoplasm; mycosis fungoides; myelodysplastic syndromes; myeloproliferative neoplasms; nasal cavity cancer; nasopharyngeal cancer; neuroblastoma; Non-Hodgkin lymphoma; nonmelanoma skin cancer; non-small cell lung cancer; oral cancer; oral cavity cancer; oropharyngeal cancer; osteosarcoma; other brain and spinal cord tumors; ovarian cancer; ovarian epithelial cancer; ovarian germ cell tumor; ovarian low malignant potential tumor; pancreatic cancer; papillomatosis; paranasal sinus cancer; parathyroid cancer; pelvic cancer; penile cancer; pharyngeal cancer; pineal parenchymal tumors of intermediate differentiation; pineoblastoma; pituitary tumor; plasma cell neoplasm/multiple myeloma; pleuropulmonary blastoma; primary central nervous system (CNS) lymphoma; primary hepatocellular liver cancer; prostate cancer; rectal cancer; renal cancer; renal cell (kidney) cancer; renal cell cancer; respiratory tract cancer; retinoblastoma; rhabdomyosarcoma; salivary gland cancer; Sézary syndrome; small cell lung cancer; small intestine cancer; soft tissue sarcoma; squamous cell carcinoma; squamous neck cancer; stomach (gastric) cancer; supratentorial primitive neuroectodermal tumors; T-cell lymphoma; testicular cancer; throat cancer; thymic carcinoma; thymoma; thyroid cancer; transitional cell cancer; transitional cell cancer of the renal pelvis and ureter; trophoblastic tumor; ureter cancer; urethral cancer; uterine cancer; uterine sarcoma; vaginal cancer; vulvar cancer; Waldenström macroglobulinemia; or Wilm's tumor. The premalignant condition can include without limitation Barrett's Esophagus. The autoimmune disease can include without limitation one of inflammatory bowel disease (IBD), Crohn's disease (CD), ulcerative colitis (UC), pelvic inflammation, vasculitis, psoriasis, diabetes, autoimmune hepatitis, multiple sclerosis, myasthenia gravis, Type I diabetes, rheumatoid arthritis, psoriasis, systemic lupus erythematosis (SLE), Hashimoto's Thyroiditis, Grave's disease, Ankylosing Spondylitis Sjogrens Disease, CREST syndrome, Scleroderma, Rheumatic Disease, organ rejection, Primary Sclerosing Cholangitis, or sepsis. The cardiovascular disease can include without limitation one of atherosclerosis, congestive heart failure, vulnerable plaque, stroke, ischemia, high blood pressure, stenosis, vessel occlusion or a thrombotic event. The neurological disease can include without limitation one of Multiple Sclerosis (MS), Parkinson's Disease (PD), Alzheimer's Disease (AD), schizophrenia, bipolar disorder, depression, autism, Prion Disease, Pick's disease, dementia, Huntington disease (HD), Down's syndrome, cerebrovascular disease, Rasmussen's encephalitis, viral meningitis, neurospsychiatric systemic lupus erythematosus (NPSLE), amyotrophic lateral sclerosis, Creutzfeldt-Jacob disease, Gerstmann-Straussler-Scheinker disease, transmissible spongiform encephalopathy, ischemic reperfusion damage (e.g. stroke), brain trauma, microbial infection, or chronic fatigue syndrome. The pain can include without limitation one of fibromyalgia, chronic neuropathic pain, or peripheral neuropathic pain. The infectious disease can include without limitation one of a bacterial infection, viral infection, yeast infection, Whipple's Disease, Prion Disease, cirrhosis, methicillin-resistant Staphylococcus aureus, HIV, HCV, hepatitis, syphilis, meningitis, malaria, tuberculosis, or influenza.

[0047] In a related aspect, the invention provides a kit comprising a reagent for carrying out the methods herein. In still another related aspect, the invention provides for use of a reagent for carrying out the methods. The reagent may comprise at least one binding agent to the at least one protein. The binding agent may be an oligonucleotide as provided herein, one or more primer for amplification or sequencing of such oligonucleotide, a binding buffer with or without MgCl₂, a sample processing reagent, a microvesicle isolation reagent, a detection reagent, a secondary detection reagent, a wash buffer, an elution buffer, a solid support, and any combination thereof. In some embodiments, the microvesicle isolation reagent comprises at least one of a concentrator unit, a filtration unit, a polymer, PEG, a size exclusion column, a binding agent to a microvesicle antigen, and any combination thereof; and/or the detection or secondary detection agent comprises streptavidin-horse radish peroxide (HRP), a streptavidin-conjugated fluorophore, a streptavidin-conjugated quantum dot, and any combination thereof.

### BRIEF DESCRIPTION OF THE DRAWINGS

[0048] FIG. 1 illustrates a competitive assay selection strategy: the random pool of aptamer (the library) is incubated with the target protein, in this case, EpCAM. After washing and elution from the target, the eluted aptamers are again added to the target and allowed to bind. The antibody is then added to the reaction, competing with the aptamers at the epitope of the antibody. The aptamers displaced by the antibody are then collected.

[0049] FIGS. 2A-2F illustrate methods of assessing biomarkers such as microvesicle surface antigens. FIG. 2A is a schematic of a planar substrate coated with a capture agent, such as an aptamer or antibody, which captures vesicles expressing the target antigen of the capture agent. The capture agent may bind a protein expressed on the surface of vesicles shed from diseased cells (“disease vesicle”). The detection agent, which may also be an aptamer or antibody, carries a detectable label, here a fluorescent signal. The detection agent binds to the captured vesicle and provides a detectable signal via its fluorescent label. The detection agent can detect an antigen that is generally associated with vesicles, or is associated with a cell-of-origin or a disease, e.g., a cancer. FIG. 2B is a schematic of a particle bead conjugated with a capture agent, which captures vesicles expressing the target antigen of the capture agent. The capture agent may bind a protein expressed on the surface of vesicles shed from diseased cells (“disease vesicle”). The detection agent, which may also be an aptamer or antibody, carries a detectable label, here a fluorescent signal. The detection agent binds to the captured vesicle and provides a detectable signal via its fluorescent label. The detection agent can detect an antigen that is generally associated with vesicles, or is associated with a cell-of-origin or a disease, e.g., a cancer. FIG. 2C is an example of a screening scheme that can be performed by using different combinations of capture and detection agents to the indicated biomarkers. The biomarker combinations can be detected using assays as shown in FIGS. 2A-2B. FIGS. 2D-2E present illustrative schemes for capturing and detecting vesicles to characterize a phenotype. FIG. 2F presents illustrative schemes for assessing vesicle payload to characterize a phenotype.

[0050] FIGS. 3A-B illustrates a non-limiting example of an aptamer nucleotide sequence and its secondary structure. FIG. 3A illustrates a secondary structure of a 32-mer oligonucleotide, Aptamer 4, with sequence 5′-CCCCCCGAATCACATGACTTGGGCGGGGGTCG (SEQ ID NO. 1). In the figure, the sequence is shown with 6 thymine nucleotides added to the end, which can act as a spacer to attach a biotin molecule. This particular oligo has a high binding affinity to the target, EpCAM (see Table 5). Additional candidate EpCAM binders are identified by modeling the entire database of sequenced oligos to the secondary structure of this oligo. FIG. 3B illustrates another 32-mer oligo with sequence 5′-ACCGGATAGCGGTTGGAGGCGTGCTCCACTCG (SEQ ID NO. 2) that has a different secondary structure than the aptamer in FIG. 3A. This aptamer is also shown with a 6-thymine tail. Figure discloses SEQ ID NOS 4456-4457, respectively, in order of appearance.

[0051] FIG. 4 illustrates a process for producing a target-specific set of aptamers using a cell subtraction method, wherein the target is a biomarker associated with a specific disease. In Step 1, a random pool of oligonucleotides are contacted with a biological sample from a normal patient. In Step 2, the oligos that did not bind in Step 1 are added to a biological sample isolated from diseased patients. The bound oligos from this step are then eluted, captured via their biotin linkage and then combined again with normal biological sample. The unbound oligos are then added again to disease-derived biological sample and isolated. This process can be repeated iteratively. The final eluted aptamers are tested against patient samples to measure the sensitivity and specificity of the set. Biological samples can include blood, including plasma or serum, or other components of the circulatory system, such as microvesicles.

[0052] FIG. 5 illustrates results from a binding assay showing the binding affinity of an exemplary aptamer (Aptamer ID BTX176881 (SEQ ID NO: 3)) to the target EpCAM protein at various target concentrations. The aptamer to be tested is fixed to a substrate using a biotin tail and is incubated with various concentrations of target (125, 250 and 500 nM). The test is performed on a surface plasmon resonance machine (SPR). The SPR machine detects association and disassociation of the aptamer and the target. Target is applied until the association and disassociation events are equal, resulting in a plateau of the curve. The equations describing the curve at each concentration can then be used to calculate the K_{D} of the aptamer (see Table 5).

[0053] FIGS. 6A-D illustrate the use of an anti-EpCAM aptamer (Aptamer 4; SEQ ID NO. 1) to detect a microvesicle population. Vesicles in patient plasma samples were captured using bead-conjugated antibodies to the indicated microvesicle surface antigens: A) EGFR; B) PBP; C) EpCAM; D) KLK2. Fluorescently labeled Aptamer 4 was used as a detector in the microbead assay. The figure shows average median fluorescence values (MFI values) for three cancer (C1-C3) and three normal samples (N1-N3) in each plot. In each plot, the samples from left to right are ordered as: C1, C2, C3, N1, N2, N3.

[0054] FIG. 7A illustrates the sequence of EPCAM aptamer CAR003 (SEQ ID NO. 4). FIG. 7B illustrates the optimal secondary structure of CAR003 with a minimum free energy (AG) of −30.00 kcal/mol. For purposes of illustration, the aptamer is shown as an RNA aptamer (SEQ ID NO. 5) corresponding to the DNA sequence in FIG. 7A. FIG. 7C illustrates aptamer pool purification. The figure comprises an FPLC chromatogram with all product and fractions assigned in pools after checking quality on gel. FIG. 7D illustrates a SYBR GOLD stained gel with different FPLC fractions of CAR003 aptamer after synthesis. Different fractions were combined in pools based on amount of un-finished chains in order high to low (pool 1-pool 3). The pools 1-3 correspond to those indicated in FIG. 7C. FIG. 7E-F illustrate binding of CAR003 to EPCAM protein in 25 mM HEPES with PBS-BN (FIG. 7E) or in 25 mM HEPES with 1 mM MgCl₂ (FIG. 7F). FIG. 7G illustrates CAR003 binding to EpCAM in the indicated salts with and without addition of bovine serum albumin (BSA). FIG. 7H illustrates the effect of denaturing on CAR003 binding to EPCAM protein. In each group of four bars, the aptamer is from left to right: Aptamer 4, CAR003 Pool 1, CAR003 Pool 2, CAR003 Pool 3. FIG. 7I illustrates titration of aptamers against EPCAM recombinant protein (constant input 5 μg). FIG. 7J illustrates a Western blot with CAR003 aptamer versus EPCAM his-tagged protein, BSA, and HSA (5 μg each). The gel was blocked 0.5% F127 and probed with ˜50 μg/ml CAR003 biotinylated aptamer, fraction 3. The blot was visualized with NeutrAvidin-HRP followed by SuperSignal West Femto Chemiluminescent Substrate.

[0055] FIGS. 8A-8D illustrates methods to attach microvesicles to a substrate. FIG. 8A illustrates direct conjugation of a carboxylated microsphere to a vesicle surface antigen. FIG. 8B illustrates anchoring of a microvesicle to a microsphere via a biotin functionalized lipid anchor. FIG. 8C illustrates antibody binding to a vesicle surface antigen, wherein the antibody is conjugated to a carboxylated microsphere.

[0056] FIG. 8D illustrates aptamer binding to a vesicle surface antigen, wherein the aptamer is conjugated to a carboxylated microsphere. FIG. 8D discloses SEQ ID NO: 4458.

[0057] FIG. 9 comprises a schematic for identifying a target of a selected aptamer, such as an aptamer selected by the process of the invention. The figure shows a binding agent 902, here an aptamer for purposes of illustration, tethered to a substrate 901. The binding agent 902 can be covalently attached to substrate 901. The binding agent 902 may also be non-covalently attached. For example, binding agent 902 can comprise a label which can be attracted to the substrate, such as a biotin group which can form a complex with an avidin/streptavidin molecule that is covalently attached to the substrate. The binding agent 902 binds to a surface antigen 903 of microvesicle 904. In the step signified by arrow (i), the microvesicle is disrupted while leaving the complex between the binding agent 902 and surface antigen 903 intact. Disrupted microvesicle 905 is removed, e.g., via washing or buffer exchange, in the step signified by arrow (ii). In the step signified by arrow (iii), the surface antigen 903 is released from the binding agent 902. The surface antigen 903 can be analyzed to determine its identity.

[0058] FIGS. 10A-10C illustrate binding of selected aptamers against microbeads conjugated to various input sample. The aptamers were selected from an aptamer library as binding to microbeads conjugated to breast cancer-derived microvesicles. Experimental details are in the Examples herein. Each plot shows a different aptamer. The Y-axis indicates level of binding. In each group of samples, binding of 9 purified aptamer candidates is shown. The input sample is indicated on the X axis from left to right as follows: 1) Cancer Exosome: aptamer binding to microbeads conjugated to microvesicles isolated from plasma samples from breast cancer patients; 2) Cancer Non-exosome: aptamer binding to microbeads conjugated to plasma samples from breast cancer patients after removal of microvesicles by ultracentrifugation; 3) Non-Cancer Exosome: aptamer binding to microbeads conjugated to microvesicles isolated from plasma samples from normal (i.e., non-breast cancer) patients; 4) Non-Cancer Non-Exosome: aptamer binding to microbeads conjugated to plasma samples from breast cancer patients after removal of microvesicles by ultracentrifugation.

[0059] FIGS. 11A-11B illustrate enriching a naïve aptamer library for aptamers that differentiate between breast cancer and non-cancer microvesicles in plasma samples.

[0060] FIGS. 12A-12G illustrate using an oligonucleotide probe library to differentiate cancer and non-cancer samples.

[0061] FIG. 13 shows protein targets of oligonucleotide probes run on a silver stained SDS-PAGE gel.

[0062] FIGS. 14A-G illustrate use of oligonucleotides that differentiate microvesicles in breast cancer plasma from normal controls. FIG. 14G discloses SEQ ID NOS 971 and 970, respectively, in order of appearance.

[0063] FIG. 15 shows a heatmap of clusters of oligonucleotides enriched against aggressive versus non-aggressive breast cancer plains samples.

[0064] FIGS. 16A-B illustrate a model generated using a training (FIG. 16A) and test (FIG. 16B) set from a round of cross validation. The AUC for the test set was 0.803. Another exemplary round of cross-validation is shown in FIGS. 16C-D with training (FIG. 16C) and test (FIG. 16D) sets. The AUC for the test set was 0.678.

[0065] FIGS. 17A-E show a photo-cleavable Biotin mediated purification of an oligonucleotide library.

[0066] FIGS. 18A-C illustrate SUPRA (SsDNA by Unequal length PRimer Asymmetric PCR), a protocol for single stranded DNA (ssDNA) oligonucleotide library preparation.

[0067] FIGS. 19A-C illustrate use of aptamers in methods of characterizing a phenotype. FIG. 19A is a schematic 1900 showing an assay configuration that can be used to detect and/or quantify a target of interest. In the figure, capture aptamer 1902 is attached to substrate 1901. Target of interest 1903 is bound by capture aptamer 1902. Detection aptamer 1904 is also bound to target of interest 1903. Detection aptamer 1904 carries label 1905 which can be detected to identify target captured to substrate 1901 via capture aptamer 1902. FIG. 19B is a schematic 1910 showing use of an aptamer pool to characterize a phenotype. A pool of aptamers to a target of interest is provided 1911. The pool is contacted with a test sample to be characterized 1912. The mixture is washed to remove unbound aptamers. The remaining aptamers are disassociated and collected 1913. The collected aptamers are identified 1914 and the identity of the retained aptamers is used to characterize the phenotype 1915. FIG. 19C is a schematic 1920 showing an implementation of the method in FIG. 19B. A pool of aptamers identified as binding a microvesicle population is provided 1919. The input sample comprises microvesicles that are isolated from a test sample 1920. The pool is contacted with the isolated microvesicles to be characterized 1923. The mixture is washed to remove unbound aptamers and the remaining aptamers are disassociated and collected 1925. The collected aptamers are identified and the identity of the retained aptamers is used to characterize the phenotype 1926.

[0068] FIGS. 20A-I illustrate development and use of an oligonucleotide probe library to distinguish biological sample types.

[0069] FIGS. 21A-C illustrate enriching a naïve oligonucleotide library with balanced design for oligonucleotides that differentiate between breast cancer and non-cancer microvesicles derived from plasma samples.

[0070] FIGS. 22A-D shows characterization of breast cancer samples as cancer or non-cancer using two different but related oligonucleotide probe libraries.

[0071] FIGS. 23A-E illustrate oligonucleotide constructs that recognize immunomodulatory (IMD) targets.

[0072] FIGS. 24A-C illustrate identification of oligonucleotides that recognize C1q and other targets.

### DETAILED DESCRIPTION OF THE INVENTION

[0073] The details of one or more embodiments of the invention are set forth in the accompanying description below. Although any methods and materials similar or equivalent to those described herein can be used in the practice or testing of the present invention, the preferred methods and materials are now described. Other features, objects, and advantages of the invention will be apparent from the description. In the specification, the singular forms also include the plural unless the context clearly dictates otherwise. Unless defined otherwise, all technical and scientific terms used herein have the same meaning as commonly understood by one of ordinary skill in the art to which this invention belongs. In the case of conflict, the present Specification will control.

[0074] Disclosed herein are compositions and methods that can be used to assess a biomarker profile, which can include a presence or level of one or more biomarkers. The compositions and methods of the invention comprise the use of oligonucleotide probes (aptamers) that bind microvesicle surface antigens or a functional fragment thereof. The antigens typically comprise proteins or polypeptides but can be any useful component displayed on a microvesicle surface including nucleic acids, lipids and/or carbohydrates. In general, the oligonucleotides disclosed are synthetic nucleic acid molecules, including DNA and RNA, and variations thereof. Unless otherwise specified, the oligonucleotide probes can be synthesized in DNA or RNA format or as hybrid molecules as desired. The methods disclosed comprise diagnostic processes and techniques using one or more aptamer of the invention, to determine the level or presence of relevant microvesicle surface antigens or a functional fragment thereof. Alternatively, an oligonucleotide probe of the invention can also be used as a binding agent to capture, isolate, or enrich, a cell, cell fragment, vesicle or any other fragment or complex that comprises the antigen or functional fragments thereof.

[0075] The compositions and methods of the invention comprise individual oligonucleotides that are identified for use in assessing a biomarker profile. The invention further discloses compositions and methods of oligonucleotide pools that can be used to detect a biomarker profile in a given sample.

[0076] Oligonucleotide probes and sequences disclosed in the compositions and methods of the invention may be identified herein in the form of DNA or RNA. Unless otherwise specified, one of skill in the art will appreciate that an oligonucleotide may generally be synthesized as either form of nucleic acid and carry various chemical modifications and remain within the scope of the invention. The term aptamer may be used in the art to refer to a single oligonucleotide that binds specifically to a target of interest through mechanisms other than Watson crick base pairing, similar to binding of a monoclonal antibody to a particular antigen. Within the scope of this disclosure and unless stated explicitly or otherwise implicit in context, the terms aptamer, oligonucleotide and oligonucleotide probe, and variations thereof, may be used interchangeably to refer to an oligonucleotide capable of distinguishing biological entities of interest (e.g, biomarkers) whether or not the specific entity has been identified or whether the precise mode of binding has been determined.

[0077] An oligonucleotide probe of the invention can also be used to provide in vitro or in vivo detection or imaging, to provide any appropriate diagnostic readout (e.g., diagnostic, prognostic or theranostic). Separately, an oligonucleotide probe of the invention can also be used for treatment or as a therapeutic to specifically target a cell, tissue or organ.

### Aptamers

[0078] SELEX. A suitable method for generating an aptamer is with the process entitled “Systematic Evolution of Ligands by Exponential Enrichment” (“SELEX”) generally described in, e.g., U.S. patent application Ser. No. 07/536,428, filed Jun. 11, 1990, now abandoned, U.S. Pat. No. 5,475,096 entitled “Nucleic Acid Ligands”, and U.S. Pat. No. 5,270,163 (see also WO 91/19813) entitled “Nucleic Acid Ligands”. Each SELEX-identified nucleic acid ligand, i.e., each aptamer, is a specific ligand of a given target compound or molecule. The SELEX process is based on the unique insight that nucleic acids have sufficient capacity for forming a variety of two- and three-dimensional structures and sufficient chemical versatility available within their monomers to act as ligands (i.e., form specific binding pairs) with virtually any chemical compound, whether monomeric or polymeric. Molecules of any size or composition can serve as targets.

[0079] SELEX relies as a starting point upon a large library or pool of single stranded oligonucleotides comprising randomized sequences. The oligonucleotides can be modified or unmodified DNA, RNA, or DNA/RNA hybrids. In some examples, the pool comprises 100% random or partially random oligonucleotides. In other examples, the pool comprises random or partially random oligonucleotides containing at least one fixed and/or conserved sequence incorporated within randomized sequence. In other examples, the pool comprises random or partially random oligonucleotides containing at least one fixed and/or conserved sequence at its 5′ and/or 3′ end which may comprise a sequence shared by all the molecules of the oligonucleotide pool. Fixed sequences are sequences such as hybridization sites for PCR primers, promoter sequences for RNA polymerases (e.g., T3, T4, T7, and SP6), restriction sites, or homopolymeric sequences, such as poly A or poly T tracts, catalytic cores, sites for selective binding to affinity columns, and other sequences to facilitate cloning and/or sequencing of an oligonucleotide of interest. Conserved sequences are sequences, other than the previously described fixed sequences, shared by a number of aptamers that bind to the same target.

[0080] The oligonucleotides of the pool preferably include a randomized sequence portion as well as fixed sequences necessary for efficient amplification. Typically the oligonucleotides of the starting pool contain fixed 5′ and 3′ terminal sequences which flank an internal region of 30-50 random nucleotides. The randomized nucleotides can be produced in a number of ways including chemical synthesis and size selection from randomly cleaved cellular nucleic acids. Sequence variation in test nucleic acids can also be introduced or increased by mutagenesis before or during the selection/amplification iterations.

[0081] The random sequence portion of the oligonucleotide can be of any length and can comprise ribonucleotides and/or deoxyribonucleotides and can include modified or non-natural nucleotides or nucleotide analogs. See, e.g. U.S. Pat. Nos. 5,958,691; 5,660,985; 5,958,691; 5,698,687; 5,817,635; 5,672,695, and PCT Publication WO 92/07065. Random oligonucleotides can be synthesized from phosphodiester-linked nucleotides using solid phase oligonucleotide synthesis techniques well known in the art. See, e.g., Froehler et al., Nucl. Acid Res. 14:5399-5467 (1986) and Froehler et al., Tet. Lett. 27:5575-5578 (1986). Random oligonucleotides can also be synthesized using solution phase methods such as triester synthesis methods. See, e.g., Sood et al., Nucl. Acid Res. 4:2557 (1977) and Hirose et al., Tet. Lett., 28:2449 (1978). Typical syntheses carried out on automated DNA synthesis equipment yield 10¹⁴-10¹⁶ individual molecules, a number sufficient for most SELEX experiments. Sufficiently large regions of random sequence in the sequence design increases the likelihood that each synthesized molecule is likely to represent a unique sequence.

[0082] The starting library of oligonucleotides may be generated by automated chemical synthesis on a DNA synthesizer. To synthesize randomized sequences, mixtures of all four nucleotides are added at each nucleotide addition step during the synthesis process, allowing for random incorporation of nucleotides. As stated above, in one embodiment, random oligonucleotides comprise entirely random sequences; however, in other embodiments, random oligonucleotides can comprise stretches of nonrandom or partially random sequences. Partially random sequences can be created by adding the four nucleotides in different molar ratios at each addition step.

[0083] The starting library of oligonucleotides may be for example, RNA, DNA, or RNA/DNA hybrid. In those instances where an RNA library is to be used as the starting library it is typically generated by transcribing a DNA library in vitro using T7 RNA polymerase or modified T7 RNA polymerases and purified. The library is then mixed with the target under conditions favorable for binding and subjected to step-wise iterations of binding, partitioning and amplification, using the same general selection scheme, to achieve virtually any desired criterion of binding affinity and selectivity. More specifically, starting with a mixture containing the starting pool of nucleic acids, the SELEX method includes steps of: (a) contacting the mixture with the target under conditions favorable for binding; (b) partitioning unbound nucleic acids from those nucleic acids which have bound specifically to target molecules; (c) dissociating the nucleic acid-target complexes; (d) amplifying the nucleic acids dissociated from the nucleic acid-target complexes to yield a ligand-enriched mixture of nucleic acids; and (e) reiterating the steps of binding, partitioning, dissociating and amplifying through as many cycles as desired to yield highly specific, high affinity nucleic acid ligands to the target molecule. In those instances where RNA aptamers are being selected, the SELEX method further comprises the steps of: (i) reverse transcribing the nucleic acids dissociated from the nucleic acid-target complexes before amplification in step (d); and (ii) transcribing the amplified nucleic acids from step (d) before restarting the process.

[0084] Within a nucleic acid mixture containing a large number of possible sequences and structures, there is a wide range of binding affinities for a given target. A nucleic acid mixture comprising, for example, a 20 nucleotide randomized segment can have 4²⁰ candidate possibilities. Those which have the higher affinity constants for the target are most likely to bind to the target. After partitioning, dissociation and amplification, a second nucleic acid mixture is generated, enriched for the higher binding affinity candidates. Additional rounds of selection progressively favor better ligands until the resulting nucleic acid mixture is predominantly composed of only one or a few sequences. These can then be cloned, sequenced and individually tested for binding affinity as pure ligands or aptamers.

[0085] Cycles of selection and amplification are repeated until a desired goal is achieved. In the most general case, selection/amplification is continued until no significant improvement in binding strength is achieved on repetition of the cycle. The method is typically used to sample approximately 10¹⁴ different nucleic acid species but may be used to sample as many as about 10¹⁸ different nucleic acid species. Generally, nucleic acid aptamer molecules are selected in a 5 to 20 cycle procedure. In one embodiment, heterogeneity is introduced only in the initial selection stages and does not occur throughout the replicating process.

[0086] In one embodiment of SELEX, the selection process is so efficient at isolating those nucleic acid ligands that bind most strongly to the selected target, that only one cycle of selection and amplification is required. Such an efficient selection may occur, for example, in a chromatographic-type process wherein the ability of nucleic acids to associate with targets bound on a column operates in such a manner that the column is sufficiently able to allow separation and isolation of the highest affinity nucleic acid ligands.

[0087] In many cases, it is not necessarily desirable to perform the iterative steps of SELEX until a single nucleic acid ligand is identified. The target-specific nucleic acid ligand solution may include a family of nucleic acid structures or motifs that have a number of conserved sequences and a number of sequences which can be substituted or added without significantly affecting the affinity of the nucleic acid ligands to the target. By terminating the SELEX process prior to completion, it is possible to determine the sequence of a number of members of the nucleic acid ligand solution family. The invention provides for the identification of aptamer pools and uses thereof that jointly can be used to characterize a test sample. For example, the aptamer pools can be identified through rounds of positive and negative selection to identify microvesicle indicative of a disease or condition. The invention further provides use of such aptamer pools to detect and/or quantify such microvesicles in a sample, thereby allowing a diagnosis, prognosis or theranosis to be provided.

[0088] A variety of nucleic acid primary, secondary and tertiary structures are known to exist. The structures or motifs that have been shown most commonly to be involved in non-Watson-Crick type interactions are referred to as hairpin loops, symmetric and asymmetric bulges, pseudoknots and myriad combinations of the same. Almost all known cases of such motifs suggest that they can be formed in a nucleic acid sequence of no more than 30 nucleotides. For this reason, it is often preferred that SELEX procedures with contiguous randomized segments be initiated with nucleic acid sequences containing a randomized segment of between about 20 to about 50 nucleotides and in some embodiments, about 30 to about 40 nucleotides. In one example, the 5′-fixed:random:3′-fixed sequence comprises a random sequence of about 30 to about 50 nucleotides.

[0089] The core SELEX method has been modified to achieve a number of specific objectives. For example, U.S. Pat. No. 5,707,796 describes the use of SELEX in conjunction with gel electrophoresis to select nucleic acid molecules with specific structural characteristics, such as bent DNA. U.S. Pat. No. 5,763,177 describes SELEX based methods for selecting nucleic acid ligands containing photoreactive groups capable of binding and/or photocrosslinking to and/or photoinactivating a target molecule. U.S. Pat. Nos. 5,567,588 and 5,861,254 describe SELEX based methods which achieve highly efficient partitioning between oligonucleotides having high and low affinity for a target molecule. U.S. Pat. No. 5,496,938 describes methods for obtaining improved nucleic acid ligands after the SELEX process has been performed. U.S. Pat. No. 5,705,337 describes methods for covalently linking a ligand to its target.

[0090] SELEX can also be used to obtain nucleic acid ligands that bind to more than one site on the target molecule, and to obtain nucleic acid ligands that include non-nucleic acid species that bind to specific sites on the target. SELEX provides means for isolating and identifying nucleic acid ligands which bind to any envisionable target, including large and small biomolecules such as nucleic acid-binding proteins and proteins not known to bind nucleic acids as part of their biological function as well as lipids, cofactors and other small molecules. For example, U.S. Pat. No. 5,580,737 discloses nucleic acid sequences identified through SELEX which are capable of binding with high affinity to caffeine and the closely related analog, theophylline.

[0091] Counter-SELEX is a method for improving the specificity of nucleic acid ligands to a target molecule by eliminating nucleic acid ligand sequences with cross-reactivity to one or more non-target molecules. Counter-SELEX is comprised of the steps of: (a) preparing a candidate mixture of nucleic acids; (b) contacting the candidate mixture with the target, wherein nucleic acids having an increased affinity to the target relative to the candidate mixture may be partitioned from the remainder of the candidate mixture; (c) partitioning the increased affinity nucleic acids from the remainder of the candidate mixture; (d) dissociating the increased affinity nucleic acids from the target; e) contacting the increased affinity nucleic acids with one or more non-target molecules such that nucleic acid ligands with specific affinity for the non-target molecule(s) are removed; and (f) amplifying the nucleic acids with specific affinity only to the target molecule to yield a mixture of nucleic acids enriched for nucleic acid sequences with a relatively higher affinity and specificity for binding to the target molecule. As described above for SELEX, cycles of selection and amplification are repeated until a desired goal is achieved.

[0092] One potential problem encountered in the use of nucleic acids as therapeutics and vaccines is that oligonucleotides in their phosphodiester form may be quickly degraded in body fluids by intracellular and extracellular enzymes such as endonucleases and exonucleases before the desired effect is manifest. The SELEX method thus encompasses the identification of high-affinity nucleic acid ligands containing modified nucleotides conferring improved characteristics on the ligand, such as improved in vivo stability or improved delivery characteristics. Examples of such modifications include chemical substitutions at the ribose and/or phosphate and/or base positions. SELEX identified nucleic acid ligands containing modified nucleotides are described, e.g., in U.S. Pat. No. 5,660,985, which describes oligonucleotides containing nucleotide derivatives chemically modified at the 2′ position of ribose, 5′ position of pyrimidines, and 8′ position of purines, U.S. Pat. No. 5,756,703 which describes oligonucleotides containing various 2′-modified pyrimidines, and U.S. Pat. No. 5,580,737 which describes highly specific nucleic acid ligands containing one or more nucleotides modified with 2′-amino (2′-NH₂), 2′-fluoro (2′-F), and/or 2′-O-methyl (2′-OMe) substituents.

[0093] Modifications of the nucleic acid ligands contemplated in this invention include, but are not limited to, those which provide other chemical groups that incorporate additional charge, polarizability, hydrophobicity, hydrogen bonding, electrostatic interaction, and fluxionality to the nucleic acid ligand bases or to the nucleic acid ligand as a whole. Modifications to generate oligonucleotide populations which are resistant to nucleases can also include one or more substitute internucleotide linkages, altered sugars, altered bases, or combinations thereof. Such modifications include, but are not limited to, 2′-position sugar modifications, 5-position pyrimidine modifications, 8-position purine modifications, modifications at exocyclic amines, substitution of 4-thiouridine, substitution of 5-bromo or 5-iodo-uracil; backbone modifications, phosphorothioate or allyl phosphate modifications, methylations, and unusual base-pairing combinations such as the isobases isocytidine and isoguanosine. Modifications can also include 3′ and 5′ modifications such as capping.

[0094] In one embodiment, oligonucleotides are provided in which the P(O)O group is replaced by P(O)S (“thioate”), P(S)S (“dithioate”), P(O)NR₂ (“amidate”), P(O)R, P(O)OR′, CO or CH₂ (“formacetal”) or 3′-amine (—NH—CH₂—CH₂—), wherein each R or R′ is independently H or substituted or unsubstituted alkyl. Linkage groups can be attached to adjacent nucleotides through an —O—, —N—, or —S— linkage. Not all linkages in the oligonucleotide are required to be identical. As used herein, the term phosphorothioate encompasses one or more non-bridging oxygen atoms in a phosphodiester bond replaced by one or more sulfur atoms.

[0095] In further embodiments, the oligonucleotides comprise modified sugar groups, for example, one or more of the hydroxyl groups is replaced with halogen, aliphatic groups, or functionalized as ethers or amines. In one embodiment, the 2′-position of the furanose residue is substituted by any of an O-methyl, O-alkyl, O-allyl, S-alkyl, S-allyl, or halo group. Methods of synthesis of 2′-modified sugars are described, e.g., in Sproat, et al., Nucl. Acid Res. 19:733-738 (1991); Cotten, et al., Nucl. Acid Res. 19:2629-2635 (1991); and Hobbs, et al., Biochemistry 12:5138-5145 (1973). Other modifications are known to one of ordinary skill in the art. Such modifications may be pre-SELEX process modifications or post-SELEX process modifications (modification of previously identified unmodified ligands) or may be made by incorporation into the SELEX process.

[0096] Pre-SELEX process modifications or those made by incorporation into the SELEX process yield nucleic acid ligands with both specificity for their SELEX target and improved stability, e.g., in vivo stability. Post-SELEX process modifications made to nucleic acid ligands may result in improved stability, e.g., in vivo stability without adversely affecting the binding capacity of the nucleic acid ligand.

[0097] The SELEX method encompasses combining selected oligonucleotides with other selected oligonucleotides and non-oligonucleotide functional units as described in U.S. Pat. Nos. 5,637,459 and 5,683,867. The SELEX method further encompasses combining selected nucleic acid ligands with lipophilic or non-immunogenic high molecular weight compounds in a diagnostic or therapeutic complex, as described, e.g., in U.S. Pat. Nos. 6,011,020, 6,051,698, and PCT Publication No. WO 98/18480. These patents and applications teach the combination of a broad array of shapes and other properties, with the efficient amplification and replication properties of oligonucleotides, and with the desirable properties of other molecules.

[0098] The identification of nucleic acid ligands to small, flexible peptides via the SELEX method has also been explored. Small peptides have flexible structures and usually exist in solution in an equilibrium of multiple conformers, and thus it was initially thought that binding affinities may be limited by the conformational entropy lost upon binding a flexible peptide. However, the feasibility of identifying nucleic acid ligands to small peptides in solution was demonstrated in U.S. Pat. No. 5,648,214. In this patent, high affinity RNA nucleic acid ligands to substance P, an 11 amino acid peptide, were identified.

[0099] The aptamers with specificity and binding affinity to the target(s) of the present invention can be selected by the SELEX N process as described herein. As part of the SELEX process, the sequences selected to bind to the target are then optionally minimized to determine the minimal sequence having the desired binding affinity. The selected sequences and/or the minimized sequences are optionally optimized by performing random or directed mutagenesis of the sequence to increase binding affinity or alternatively to determine which positions in the sequence are essential for binding activity. Additionally, selections can be performed with sequences incorporating modified nucleotides to stabilize the aptamer molecules against degradation in vivo.

### 2′ Modified SELEX

[0100] For an aptamer to be suitable for use as a therapeutic, it is preferably inexpensive to synthesize, and safe and stable in vivo. Wild-type RNA and DNA aptamers are typically not stable is vivo because of their susceptibility to degradation by nucleases. Resistance to nuclease degradation can be greatly increased by the incorporation of modifying groups at the 2′-position.

[0101] Fluoro and amino groups have been successfully incorporated into oligonucleotide pools from which aptamers have been subsequently selected. However, these modifications greatly increase the cost of synthesis of the resultant aptamer, and may introduce safety concerns in some cases because of the possibility that the modified nucleotides could be recycled into host DNA by degradation of the modified oligonucleotides and subsequent use of the nucleotides as substrates for DNA synthesis.

[0102] Aptamers that contain 2′-O-methyl (“2′-OMe”) nucleotides, as provided herein, may overcome one or more potential drawbacks. Oligonucleotides containing 2′-OMe nucleotides are nuclease-resistant and inexpensive to synthesize. Although 2′-OMe nucleotides are ubiquitous in biological systems, natural polymerases do not accept 2′-OMe NTPs as substrates under physiological conditions, thus there are no safety concerns over the recycling of 2′-OMe nucleotides into host DNA. The SELEX method used to generate 2-modified aptamers is described, e.g., in U.S. Provisional Patent Application Ser. No. 60/430,761, filed Dec. 3, 2002, U.S. Provisional Patent Application Ser. No. 60/487,474, filed Jul. 15, 2003, U.S. Provisional Patent Application Ser. No. 60/517,039, filed Nov. 4, 2003, U.S. patent application Ser. No. 10/729,581, filed Dec. 3, 2003, and U.S. patent application Ser. No. 10/873,856, filed Jun. 21, 2004, entitled “Method for in vitro Selection of 2-O-methyl substituted Nucleic Acids”, each of which is herein incorporated by reference in its entirety.

### Methods

### Biomarker Detection and Diagnostics

[0103] The aptamers of the invention can be used in various methods to assess presence or level of biomarkers in a biological sample, e.g., biological entities of interest such as proteins, nucleic acids, or microvesicles. The aptamer functions as a binding agent to assess presence or level of the cognate target molecule. Therefore, in various embodiments of the invention directed to diagnostics, prognostics or theranostics, one or more aptamers of the invention are configured in a ligand-target based assay, where one or more aptamer of the invention is contacted with a selected biological sample, where the or more aptamer associates with or binds to its target molecules. Aptamers of the invention are used to identify candidate biosignatures based on the biological samples assessed and biomarkers detected. In further embodiments, aptamers may themselves provide a biosignature for a particular condition or disease. A biosignature refers to a biomarker profile of a biological sample comprising a presence, level or other characteristic that can be assessed (including without limitation a sequence, mutation, rearrangement, translocation, deletion, epigenetic modification, methylation, post-translational modification, allele, activity, complex partners, stability, half life, and the like) of one or more biomarker of interest. Biosignatures can be used to evaluate diagnostic and/or prognostic criteria such as presence of disease, disease staging, disease monitoring, disease stratification, or surveillance for detection, metastasis or recurrence or progression of disease. For example, methods of the invention using aptamers against microvesicle surface antigen are useful for correlating a biosignature comprising microvesicle antigens to a selected condition or disease. A biosignature can also be used clinically in making decisions concerning treatment modalities including therapeutic intervention. A biosignature can further be used clinically to make treatment decisions, including whether to perform surgery or what treatment standards should be used along with surgery (e.g., either pre-surgery or post-surgery). As an illustrative example, a biosignature of circulating biomarkers that indicates an aggressive form of cancer may call for a more aggressive surgical procedure and/or more aggressive therapeutic regimen to treat the patient.

[0104] A biosignature can be used in any methods disclosed herein, e.g., to assess whether a subject is afflicted with disease, is at risk for developing disease or to assess the stage or progression of the disease. For example, a biosignature can be used to assess whether a subject has prostate cancer, colon cancer, or other cancer as described herein. Furthermore, a biosignature can be used to determine a stage of a disease or condition, such as colon cancer. The biosignature/biomarker profile comprising a microvesicle can include assessment of payload within the microvesicle. For example, one or more aptamer of the invention can be used to capture a microvesicle population, thereby providing readout of microvesicle antigens, and then the payload content within the captured microvesicles can be assessed, thereby providing further biomarker readout of the payload content.

[0105] A biosignature for characterizing a phenotype may comprise any number of useful criteria. As described further below, the term “phenotype” as used herein can mean any trait or characteristic that is attributed to a biosignature/biomarker profile. A phenotype can be detected or identified in part or in whole using the compositions and/or methods of the invention. In some embodiments, at least one criterion is used for each biomarker. In some embodiments, at least 1, 2, 3, 4, 5, 6, 7, 8, 9, 10, 15, 20, 30, 40, 50, 60, 70, 80, 90 or at least 100 criteria are used. For example, for the characterizing of a cancer, a number of different criteria can be used when the subject is diagnosed with a cancer: 1) if the amount of microRNA in a sample from a subject is higher than a reference value; 2) if the amount of a microRNA within cell type specific vesicles (i.e. vesicles derived from a specific tissue or organ) is higher than a reference value; or 3) if the amount of microRNA within vesicles with one or more cancer specific biomarkers is higher than a reference value. Similar rules can apply if the amount of microRNA is less than or the same as the reference. The method can further include a quality control measure, such that the results are provided for the subject if the samples meet the quality control measure. In some embodiments, if the criteria are met but the quality control is questionable, the subject is reassessed.

### Theranostics

[0106] A biosignature can be used in therapy related diagnostics to provide tests useful to diagnose a disease or choose the correct treatment regimen, such as provide a theranosis. Theranostics includes diagnostic testing that provides the ability to affect therapy or treatment of a diseased state. Theranostics testing provides a theranosis in a similar manner that diagnostics or prognostic testing provides a diagnosis or prognosis, respectively. As used herein, theranostics encompasses any desired form of therapy related testing, including predictive medicine, personalized medicine, integrated medicine, pharmacodiagnostics and Dx/Rx partnering. Therapy related tests can be used to predict and assess drug response in individual subjects, i.e., to provide personalized medicine. Predicting a drug response can be determining whether a subject is a likely responder or a likely non-responder to a candidate therapeutic agent, e.g., before the subject has been exposed or otherwise treated with the treatment. Assessing a drug response can be monitoring a response to a drug, e.g., monitoring the subject's improvement or lack thereof over a time course after initiating the treatment. Therapy related tests are useful to select a subject for treatment who is particularly likely to benefit from the treatment or to provide an early and objective indication of treatment efficacy in an individual subject. Thus, a biosignature as disclosed herein may indicate that treatment should be altered to select a more promising treatment, thereby avoiding the great expense of delaying beneficial treatment and avoiding the financial and morbidity costs of administering an ineffective drug(s).

[0107] The compositions and methods of the invention can be used to identify or detect a biosignature associated with a variety of diseases and disorders, which include, but are not limited to cardiovascular disease, cancer, infectious diseases, sepsis, neurological diseases, central nervous system related diseases, endovascular related diseases, and autoimmune related diseases. Therapy related diagnostics (i.e., theranostics) are also useful in clinical diagnosis and management of many such diseases and disorders. Therapy related diagnostics also aid in the prediction of drug toxicity, drug resistance or drug response. Therapy related tests may be developed in any suitable diagnostic testing format, which include, but are not limited to, e.g., immunohistochemical tests, clinical chemistry, immunoassay, cell-based technologies, nucleic acid tests or body imaging methods. Therapy related tests can further include but are not limited to, testing that aids in the determination of therapy, testing that monitors for therapeutic toxicity, or response to therapy testing. Thus, a biosignature can be used to predict or monitor a subject's response to a treatment. A biosignature can be determined at different time points for a subject after initiating, removing, or altering a particular treatment.

[0108] In some embodiments, the compositions and methods of the invention provide for a determination or prediction as to whether a subject is responding to a treatment is made based on a change in the amount of one or more components of a biosignature (i.e., the microRNA, vesicles and/or biomarkers of interest), an amount of one or more components of a particular biosignature, or the biosignature detected for the components. In another embodiment, a subject's condition is monitored by determining a biosignature at different time points. The progression, regression, or recurrence of a condition is determined. Response to therapy can also be measured over a time course. Thus, the invention provides a method of monitoring a status of a disease or other medical condition in a subject, comprising isolating or detecting a biosignature from a biological sample from the subject, detecting the overall amount of the components of a particular biosignature, or detecting the biosignature of one or more components (such as the presence, absence, or expression level of a biomarker). The biosignatures are used to monitor the status of the disease or condition.

[0109] One or more novel biosignatures of a vesicle can also be identified. For example, one or more vesicles can be isolated from a subject that responds to a drug treatment or treatment regimen and compared to a reference, such as another subject that does not respond to the drug treatment or treatment regimen. Differences between the biosignatures can be determined and used to identify other subjects as responders or non-responders to a particular drug or treatment regimen.

[0110] In some embodiments, a biosignature is used to determine whether a particular disease or condition is resistant to a drug, in which case a physician need not waste valuable time with such drug treatment. To obtain early validation of a drug choice or treatment regimen, a biosignature is determined for a sample obtained from a subject. The biosignature is used to assess whether the particular subject's disease has the biomarker associated with drug resistance. Such a determination enables doctors to devote critical time as well as the patient's financial resources to effective treatments.

[0111] Biosignatures can be used in the theranosis of a cancer, such as identifying whether a subject suffering from cancer is a likely responder or non-responder to a particular cancer treatment. The subject methods can be used to theranose cancers including those listed herein, e.g., in the “Phenotypes” section below. These include without limitation lung cancer, non-small cell lung cancer small cell lung cancer (including small cell carcinoma (oat cell cancer), mixed small cell/large cell carcinoma, and combined small cell carcinoma), colon cancer, breast cancer, prostate cancer, liver cancer, pancreatic cancer, brain cancer, kidney cancer, ovarian cancer, stomach cancer, melanoma, bone cancer, gastric cancer, breast cancer, glioma, glioblastoma, hepatocellular carcinoma, papillary renal carcinoma, head and neck squamous cell carcinoma, leukemia, lymphoma, myeloma, or other solid tumors.

[0112] A biosignature of circulating biomarkers, including markers associated with a component present in a biological sample (e.g., cell, cell-fragment, cell-derived extracellular vesicle), in a sample from a subject suffering from a cancer can be used select a candidate treatment for the subject. The biosignature can be determined according to the methods of the invention presented herein. In some embodiments, the candidate treatment comprises a standard of care for the cancer. The treatment can be a cancer treatment such as radiation, surgery, chemotherapy or a combination thereof. The cancer treatment can be a therapeutic such as anti-cancer agents and chemotherapeutic regimens. Further drug associations and rules that are used in embodiments of the invention are found in PCT/US2007/69286, filed May 18, 2007; PCT/US2009/60630, filed Oct. 14, 2009; PCT/2010/000407, filed Feb. 11, 2010; PCT/US12/41393, filed Jun. 7, 2012; PCT/US2013/073184, filed Dec. 4, 2013; PCT/US2010/54366, filed Oct. 27, 2010; PCT/US11/67527, filed Dec. 28, 2011; PCT/US15/13618, filed Jan. 29, 2015; and PCT/US16/20657, filed Mar. 3, 2016.

### Biomarker Detection

[0113] The compositions and methods of the invention can be used to assess any useful biomarkers in a biological sample for charactering a phenotype associated with the sample. Such biomarkers include all sorts of biological entities such as proteins, nucleic acids, lipids, carbohydrates, complexes of any thereof, and microvesicles. Various molecules associated with a microvesicle surface or enclosed within the microvesicle (referred to herein as “payload”) can serve as biomarkers. The microvesicles themselves can also be used as biomarkers.

[0114] The aptamers of the invention can be used to assess levels or presence of a microvesicle population. See, e.g., FIGS. 19B-C. The aptamers of the invention can also be used to assess levels or presence of their specific target molecule. See, e.g., FIG. 19A. In addition, aptamers of the invention are used to capture or isolated a component present in a biological sample that has the aptamer's target molecule present. For example, if a given microvesicle surface antigen is present on a cell, cell fragment or cell-derived extracellular vesicle. A binding agent to the biomarker, including without limitation an aptamer provided by the invention, may be used to capture or isolate the cell, cell fragment or cell-derived extracellular vesicles. See, e.g., FIGS. 2A-B, 19A. Such captured or isolated entities may be further characterized to assess additional surface antigens or internal “payload” molecules present (i.e., nucleic acid molecules, lipids, sugars, polypeptides or functional fragments thereof, or anything else present in the cellular milieu that may be used as a biomarker), where one or more biomarkers provide a biosignature to assess a desired phenotype, such a s disease or condition. See, e.g., FIG. 2F. Therefore, aptamers of the invention are used not only to assess one or more microvesicle surface antigen of interest but are also used to separate a component present in a biological sample, where the components themselves can be further assessed to identify a candidate biosignature.

[0115] The methods of the invention can comprise multiplex analysis of at least 2, 3, 4, 5, 6, 7, 8, 9, 10, 11, 12, 13, 14, 15, 16, 17, 18, 19, 20, 25, 50, 75 or 100 different biomarkers. For example, an assay of a heterogeneous population of vesicles can be performed with a plurality of particles that are differentially labeled. There can be at least 2, 3, 4, 5, 6, 7, 8, 9, 10, 11, 12, 13, 14, 15, 16, 17, 18, 19, 20, 25, 50, 75 or 100 differentially labeled particles. The particles may be externally labeled, such as with a tag, or they may be intrinsically labeled. Each differentially labeled particle can be coupled to a capture agent, such as a binding agent, for a vesicle, resulting in capture of a vesicle. The multiple capture agents can be selected to characterize a phenotype of interest, including capture agents against general vesicle biomarkers, cell-of-origin specific biomarkers, and disease biomarkers. One or more biomarkers of the captured vesicle can then be detected by a plurality of binding agents. The binding agent can be directly labeled to facilitate detection. Alternatively, the binding agent is labeled by a secondary agent. For example, the binding agent may be an antibody for a biomarker on the vesicle, wherein the binding agent is linked to biotin. A secondary agent comprises streptavidin linked to a reporter and can be added to detect the biomarker. In some embodiments, the captured vesicle is assayed for at least 2, 3, 4, 5, 6, 7, 8, 9, 10, 11, 12, 13, 14, 15, 16, 17, 18, 19, 20, 25, 50, 75 or 100 different biomarkers. For example, multiple detectors, i.e., detection of multiple biomarkers of a captured vesicle or population of vesicles, can increase the signal obtained, permitted increased sensitivity, specificity, or both, and the use of smaller amounts of samples. Detection can be with more than one biomarker, including without limitation more than one vesicle marker such as in any of Tables 3-4, and Tables 18-25.

[0116] An immunoassay based method (e.g., sandwich assay) can be used to detect a biomarker of a vesicle. An example includes ELISA. A binding agent can be bound to a well. For example, a binding agent such as an aptamer or antibody to an antigen of a vesicle can be attached to a well. A biomarker on the captured vesicle can be detected based on the methods described herein. FIG. 2A shows an illustrative schematic for a sandwich-type of immunoassay. The capture agent can be against a vesicle antigen of interest, e.g., a general vesicle biomarker, a cell-of-origin marker, or a disease marker. In the figure, the captured vesicles are detected using fluorescently labeled binding agent (detection agent) against vesicle antigens of interest. Multiple capture binding agents can be used, e.g., in distinguishable addresses on an array or different wells of an immunoassay plate. The detection binding agents can be against the same antigen as the capture binding agent, or can be directed against other markers. The capture binding agent can be any useful binding agent, e.g., tethered aptamers, antibodies or lectins, and/or the detector antibodies can be similarly substituted, e.g., with detectable (e.g., labeled) aptamers, antibodies, lectins or other binding proteins or entities. In an embodiment, one or more capture agents to a general vesicle biomarker, a cell-of-origin marker, and/or a disease marker are used along with detection agents against general vesicle biomarker, such as tetraspanin molecules including without limitation one or more of CD9, CD63 and CD81, or other markers in Table 3 herein. Examples of microvesicle surface antigens are disclosed herein, e.g. in Tables 3-4 and 18-25, or are known in the art, and examples useful in methods and compositions of the invention are disclosed of International Patent Application Nos. PCT/US2009/62880, filed Oct. 30, 2009; PCT/US2009/006095, filed Nov. 12, 2009; PCT/US2011/26750, filed Mar. 1, 2011; PCT/US2011/031479, filed Apr. 6, 2011; PCT/US11/48327, filed Aug. 18, 2011; PCT/US2008/71235, filed Jul. 25, 2008; PCT/US10/58461, filed Nov. 30, 2010; PCT/US2011/21160, filed Jan. 13, 2011; PCT/US2013/030302, filed Mar. 11, 2013; PCT/US12/25741, filed Feb. 17, 2012; PCT/2008/76109, filed Sep. 12, 2008; PCT/US12/42519, filed Jun. 14, 2012; PCT/US12/50030, filed Aug. 8, 2012; PCT/US12/49615, filed Aug. 3, 2012; PCT/US12/41387, filed Jun. 7, 2012; PCT/US2013/072019, filed Nov. 26, 2013; PCT/US2014/039858, filed May 28, 2013; PCT/IB2013/003092, filed Oct. 23, 2013; PCT/US13/76611, filed Dec. 19, 2013; PCT/US14/53306, filed Aug. 28, 2014; and PCT/US15/62184, filed Nov. 23, 2015; each of which applications is incorporated herein by reference in its entirety.

[0117] FIG. 2D presents an illustrative schematic for analyzing vesicles according to the methods of the invention. Capture agents are used to capture vesicles, detectors are used to detect the captured vesicles, and the level or presence of the captured and detected microvesicles is used to characterize a phenotype. Capture agents, detectors and characterizing phenotypes can be any of those described herein. For example, capture agents include antibodies or aptamers tethered to a substrate that recognize a vesicle antigen of interest, detectors include labeled antibodies or aptamers to a vesicle antigen of interest, and characterizing a phenotype includes a diagnosis, prognosis, or theranosis of a disease. In the scheme shown in FIG. 2D i), a population of vesicles is captured with one or more capture agents against general vesicle biomarkers (200). The captured vesicles are then labeled with detectors against cell-of-origin biomarkers (201) and/or disease specific biomarkers (202). If only cell-of-origin detectors are used (201), the biosignature used to characterize the phenotype (203) can include the general vesicle markers (200) and the cell-of-origin biomarkers (201). If only disease detectors are used (202), the biosignature used to characterize the phenotype (203) can include the general vesicle markers (200) and the disease biomarkers (202). Alternately, detectors are used to detect both cell-of-origin biomarkers (201) and disease specific biomarkers (202). In this case, the biosignature used to characterize the phenotype (203) can include the general vesicle markers (200), the cell-of-origin biomarkers (201) and the disease biomarkers (202). The biomarkers combinations are selected to characterize the phenotype of interest and can be selected from the biomarkers and phenotypes described herein, e.g., in Tables 1, 3-4 and 18-25.

[0118] In the scheme shown in FIG. 2D ii), a population of vesicles is captured with one or more capture agents against cell-of-origin biomarkers (210) and/or disease biomarkers (211). The captured vesicles are then detected using detectors against general vesicle biomarkers (212). If only cell-of-origin capture agents are used (210), the biosignature used to characterize the phenotype (213) can include the cell-of-origin biomarkers (210) and the general vesicle markers (212). If only disease biomarker capture agents are used (211), the biosignature used to characterize the phenotype (213) can include the disease biomarkers (211) and the general vesicle biomarkers (212). Alternately, capture agents to one or more cell-of-origin biomarkers (210) and one or more disease specific biomarkers (211) are used to capture vesicles. In this case, the biosignature used to characterize the phenotype (213) can include the cell-of-origin biomarkers (210), the disease biomarkers (211), and the general vesicle markers (213). The biomarkers combinations are selected to characterize the phenotype of interest and can be selected from the biomarkers and phenotypes described herein.

[0119] The methods of the invention comprise capture and detection of microvesicles of interest using any combination of useful biomarkers. For example, a microvesicle population can be captured using one or more binding agent to any desired combination of cell of origin, disease specific, or general vesicle markers. The captured microvesicles can then be detected using one or more binding agent to any desired combination of cell of origin, disease specific, or general vesicle markers. FIG. 2E represents a flow diagram of such configurations. Any one or more of a cell-of-origin biomarker (240), disease biomarkers (241), and general vesicle biomarker (242) is used to capture a microvesicle population. Thereafter, any one or more of a cell-of-origin biomarker (243), disease biomarkers (244), and general vesicle biomarker (245) is used to detect the captured microvesicle population. The biosignature of captured and detected microvesicles is then used to characterize a phenotype. The biomarkers combinations are selected to characterize the phenotype of interest and can be selected from the biomarkers and phenotypes described herein.

[0120] A microvesicle payload molecule can be assessed as a member of a biosignature panel. A payload molecule comprises any of the biological entities contained within a cell, cell fragment or vesicle membrane. These entities include without limitation nucleic acids, e.g., mRNA, microRNA, or DNA fragments; protein, e.g., soluble and membrane associated proteins; carbohydrates; lipids; metabolites; and various small molecules, e.g., hormones. The payload can be part of the cellular milieu that is encapsulated as a vesicle is formed in the cellular environment. In some embodiments of the invention, the payload is analyzed in addition to detecting vesicle surface antigens. Specific populations of vesicles can be captured as described above then the payload in the captured vesicles can be used to characterize a phenotype. For example, vesicles captured on a substrate can be further isolated to assess the payload therein. Alternately, the vesicles in a sample are detected and sorted without capture. The vesicles so detected can be further isolated to assess the payload therein. In an embodiment, vesicle populations are sorted by flow cytometry and the payload in the sorted vesicles is analyzed. In the scheme shown in FIG. 2F iv), a population of vesicles is captured and/or detected (220) using one or more of cell-of-origin biomarkers (220), disease biomarkers (221), and/or general vesicle markers (222). The payload of the isolated vesicles is assessed (223). A biosignature detected within the payload can be used to characterize a phenotype (224). In a non-limiting example, a vesicle population can be analyzed in a plasma sample from a patient using antibodies against one or more vesicle antigens of interest. The antibodies can be capture antibodies which are tethered to a substrate to isolate a desired vesicle population. Alternately, the antibodies can be directly labeled and the labeled vesicles isolated by sorting with flow cytometry. The presence or level of microRNA or mRNA extracted from the isolated vesicle population can be used to detect a biosignature. The biosignature is then used to diagnose, prognose or theranose the patient.

[0121] In other embodiments, vesicle or cellular payload is analyzed in a population (e.g., cells or vesicles) without first capturing or detected subpopulations of vesicles. For example, a cellular or extracellular vesicle population can be generally isolated from a sample using centrifugation, filtration, chromatography, or other techniques as described herein and known in the art. The payload of such sample components can be analyzed thereafter to detect a biosignature and characterize a phenotype. In the scheme shown in FIG. 2F v), a population of vesicles is isolated (230) and the payload of the isolated vesicles is assessed (231). A biosignature detected within the payload can be used to characterize a phenotype (232). In a non-limiting example, a vesicle population is isolated from a plasma sample from a patient using size exclusion and membrane filtration. The presence or level of microRNA or mRNA extracted from the vesicle population is used to detect a biosignature. The biosignature is then used to diagnose, prognose or theranose the patient.

[0122] The biomarkers used to detect a vesicle population can be selected to detect a microvesicle population of interest, e.g., a population of vesicles that provides a diagnosis, prognosis or theranosis of a selected condition or disease, including but not limited to a cancer, a premalignant condition, an inflammatory disease, an immune disease, an autoimmune disease or disorder, a cardiovascular disease or disorder, neurological disease or disorder, infectious disease or pain. See Section “Phenotypes” herein for more detail. In an embodiment, the biomarkers are selected from the group consisting of EpCam (epithelial cell adhesion molecule), CD9 (tetraspanin CD9 molecule), PCSA (prostate cell specific antigen, see Rokhlin et al., 5E10: a prostate-specific surface-reactive monoclonal antibody. Cancer Lett. 1998 131:129-36), CD63 (tetraspanin CD63 molecule), CD81 (tetraspanin CD81 molecule), PSMA (FOLH1, folate hydrolase (prostate-specific membrane antigen) 1), B7H3 (CD276 molecule), PSCA (prostate stem cell antigen), ICAM (intercellular adhesion molecule), STEAP (STEAP1, six transmembrane epithelial antigen of the prostate 1), KLK2 (kallikrein-related peptidase 2), SSX2 (synovial sarcoma, X breakpoint 2), SSX4 (synovial sarcoma, X breakpoint 4), PBP (prostatic binding protein), SPDEF (SAM pointed domain containing ets transcription factor), EGFR (epidermal growth factor receptor), and a combination thereof. One or more of these markers can provide a biosignature for a specific condition, such as to detect a cancer, including without limitation a carcinoma, a prostate cancer, a breast cancer, a lung cancer, a colorectal cancer, an ovarian cancer, melanoma, a brain cancer, or other type of cancer as disclosed herein. In an embodiment, a binding agent to one or more of these markers is used to capture a microvesicle population, and an aptamer of the invention is used to assist in detection of the capture vesicles as described herein. In other embodiments, an aptamer of the invention is used to capture a microvesicle population, and a binding agent to one or more of these markers is used to assist in detection of the capture vesicles as described herein. The binding agents can be any useful binding agent as disclosed herein or known in the art, e.g., antibodies or aptamers.

[0123] The methods of characterizing a phenotype can employ a combination of techniques to assess a component or population of components present in a biological sample of interest. For example, an aptamer of the invention can be used to assess a single cell, or a single extracellular vesicle or a population of cells or population of vesicles. A sample may be split into various aliquots, where each is analyzed separately. For example, protein content of one or more aliquot is determined and microRNA content of one or more other aliquot is determined. The protein content and microRNA content can be combined to characterize a phenotype. In another embodiment, a component present in a biological sample of interest is isolated and the payload therein is assessed (e.g., capture a population of subpopulation of vesicles using an aptamer of the invention and further assess nucleic acid or proteins present in the isolated vesicles).

[0124] In one embodiment, a population of vesicles with a given surface marker can be isolated by using a binding agent to a microvesicle surface marker. See, e.g., FIGS. 2A, 2B, 21A. The binding agent can be an aptamer that was identified to target the microvesicle surface marker using to the methods of the invention. The isolated vesicles is assessed for additional biomarkers such as surface content or payload, which can be contemporaneous to detection of the aptamer-specific target or the assessment of additional biomarkers can be before or subsequent to aptamer-specific target detection.

[0125] A biosignature can be detected qualitatively or quantitatively by detecting a presence, level or concentration of a circulating biomarker, e.g., a microRNA, protein, vesicle or other biomarker, as disclosed herein. These biosignature components can be detected using a number of techniques known to those of skill in the art. For example, a biomarker can be detected by microarray analysis, polymerase chain reaction (PCR) (including PCR-based methods such as real time polymerase chain reaction (RT-PCR), quantitative real time polymerase chain reaction (Q-PCR/qPCR) and the like), hybridization with allele-specific probes, enzymatic mutation detection, ligation chain reaction (LCR), oligonucleotide ligation assay (OLA), flow-cytometric heteroduplex analysis, chemical cleavage of mismatches, mass spectrometry, nucleic acid sequencing, single strand conformation polymorphism (SSCP), denaturing gradient gel electrophoresis (DGGE), temperature gradient gel electrophoresis (TGGE), restriction fragment polymorphisms, serial analysis of gene expression (SAGE), or combinations thereof. A biomarker, such as a nucleic acid, can be amplified prior to detection. A biomarker can also be detected by immunoassay, immunoblot, immunoprecipitation, enzyme-linked immunosorbent assay (ELISA; EIA), radioimmunoassay (RIA), flow cytometry, or electron microscopy (EM).

[0126] Biosignatures can be detected using aptamers of the invention that function as either as capture agents and detection agents, as described herein. A capture agent can comprise an antibody, aptamer or other entity which recognizes a biomarker and can be used for capturing the biomarker. Biomarkers that can be captured include circulating biomarkers, e.g., a protein, nucleic acid, lipid or biological complex in solution in a bodily fluid. Similarly, the capture agent can be used for capturing a vesicle. A detection agent can comprise an antibody or other entity which recognizes a biomarker and can be used for detecting the biomarker vesicle, or which recognizes a vesicle and is useful for detecting a vesicle. In some embodiments, the detection agent is labeled and the label is detected, thereby detecting the biomarker or vesicle. The detection agent can be a binding agent, e.g., an antibody or aptamer. In other embodiments, the detection agent comprises a small molecule such as a membrane protein labeling agent. See, e.g., the membrane protein labeling agents disclosed in Alroy et al., US. Patent Publication US 2005/0158708. In an embodiment, vesicles are isolated or captured as described herein, and one or more membrane protein labeling agent is used to detect the vesicles. In many cases, the antigen or other vesicle-moiety that is recognized by the capture and detection agents are interchangeable.

[0127] In a non-limiting embodiment, a vesicle having a cell-of-origin specific antigen on its surface and a cancer-specific antigen on its surface, is captured using a binding agent that is specific to a cells-specific antigen, e.g., by tethering the capture antibody or aptamer to a substrate, and then the vesicle is detected using a binding agent to a disease-specific antigen, e.g., by labeling the binding agent used for detection with a fluorescent dye and detecting the fluorescent radiation emitted by the dye.

[0128] It will be apparent to one of skill in the art that where the target molecule for a binding agent (such as an aptamer of the invention) is informative as to assessing a condition or disease, the same binding agent can be used to both capture a component comprising the target molecule (e.g., microvesicle surface antigen of interest) and also be modified to comprise a detectable label so as to detect the target molecule, e.g., binding agent₁-antigen-binding agent₂*, wherein the * signifies a detectable label; binding agent₁ and binding agent₂ may be the same binding agent or a different binding agent (e.g., same aptamer or different aptamer). In addition, binding agent₁ and binding agent₂ can be selected from wholly different categories of binding agents (e.g., antibody, aptamer, synthetic antibody, peptide-nucleic acid molecule, or any molecule that is configured to specifically bind to or associate with its target molecule). Such binding molecules can be selected solely based on their binding specificity for a target molecule. Examples of additional biomarkers that can be incorporated into the methods and compositions of the invention are known in the art, such as those disclosed in International Patent Publication Nos. WO/2012/174282 (Int'l Appl. PCT/US2012/042519 filed Jun. 14, 2012) and WO/2013/020995 (Int'l Appl. PCT/US2012/050030 filed Aug. 8, 2013). The detectable signal can itself be associated with a nucleic acid molecule that hybridizes with a stretch of nucleic acids present in each oligonucleotide comprising a probing library. The stretch can be the same or different as to one or more oligonucleotides in a library. The detectable signal can comprise fluorescence agents, including color-coded barcodes which are known, such as in U.S. Patent Application Pub. No. 20140371088, 2013017837, and 20120258870.

[0129] Techniques of detecting biomarkers or capturing sample components using an aptamer of the invention include the use of a planar substrate such as an array (e.g., biochip or microarray), with molecules immobilized to the substrate as capture agents that facilitate the detection of a particular biosignature. The array can be provided as part of a kit for assaying one or more biomarkers. Additional examples of binding agents described above and useful in the compositions and methods of the invention are disclosed in International Patent Publication No. WO/2011/127219, entitled “Circulating Biomarkers for Disease” and filed Apr. 6, 2011, which application is incorporated by reference in its entirety herein. Aptamers of the invention can be included in an array for detection and diagnosis of diseases including presymptomatic diseases. In some embodiments, an array comprises a custom array comprising biomolecules selected to specifically identify biomarkers of interest. Customized arrays can be modified to detect biomarkers that increase statistical performance, e.g., additional biomolecules that identifies a biosignature which lead to improved cross-validated error rates in multivariate prediction models (e.g., logistic regression, discriminant analysis, or regression tree models). In some embodiments, customized array(s) are constructed to study the biology of a disease, condition or syndrome and profile biosignatures in defined physiological states. Markers for inclusion on the customized array be chosen based upon statistical criteria, e.g., having a desired level of statistical significance in differentiating between phenotypes or physiological states. In some embodiments, standard significance of p-value=0.05 is chosen to exclude or include biomolecules on the microarray. The p-values can be corrected for multiple comparisons. As an illustrative example, nucleic acids extracted from samples from a subject with or without a disease can be hybridized to a high density microarray that binds to thousands of gene sequences. Nucleic acids whose levels are significantly different between the samples with or without the disease can be selected as biomarkers to distinguish samples as having the disease or not. A customized array can be constructed to detect the selected biomarkers. In some embodiments, customized arrays comprise low density microarrays, which refer to arrays with lower number of addressable binding agents, e.g., tens or hundreds instead of thousands. Low density arrays can be formed on a substrate. In some embodiments, customizable low density arrays use PCR amplification in plate wells, e.g., TaqMan® Gene Expression Assays (Applied Biosystems by Life Technologies Corporation, Carlsbad, CA).

[0130] An aptamer of the invention or other useful binding agent may be linked directly or indirectly to a solid surface or substrate. See, e.g., FIGS. 2A-2B, 9, 21A. A solid surface or substrate can be any physically separable solid to which a binding agent can be directly or indirectly attached including, but not limited to, surfaces provided by microarrays and wells, particles such as beads, columns, optical fibers, wipes, glass and modified or functionalized glass, quartz, mica, diazotized membranes (paper or nylon), polyformaldehyde, cellulose, cellulose acetate, paper, ceramics, metals, metalloids, semiconductive materials, quantum dots, coated beads or particles, other chromatographic materials, magnetic particles; plastics (including acrylics, polystyrene, copolymers of styrene or other materials, polypropylene, polyethylene, polybutylene, polyurethanes, Teflon material, etc.), polysaccharides, nylon or nitrocellulose, resins, silica or silica-based materials including silicon and modified silicon, carbon, metals, inorganic glasses, plastics, ceramics, conducting polymers (including polymers such as polypyrole and polyindole); micro or nanostructured surfaces such as nucleic acid tiling arrays, nanotube, nanowire, or nanoparticulate decorated surfaces; or porous surfaces or gels such as methacrylates, acrylamides, sugar polymers, cellulose, silicates, or other fibrous or stranded polymers. In addition, as is known the art, the substrate may be coated using passive or chemically-derivatized coatings with any number of materials, including polymers, such as dextrans, acrylamides, gelatins or agarose. Such coatings can facilitate the use of the array with a biological sample.

[0131] As provided in the examples, below, an aptamer or other useful binding agent can be conjugated to a detectable entity or label.

[0132] Appropriate labels include without limitation a magnetic label, a fluorescent moiety, an enzyme, a chemiluminescent probe, a metal particle, a non-metal colloidal particle, a polymeric dye particle, a pigment molecule, a pigment particle, an electrochemically active species, semiconductor nanocrystal or other nanoparticles including quantum dots or gold particles, fluorophores, quantum dots, or radioactive labels. Protein labels include green fluorescent protein (GFP) and variants thereof (e.g., cyan fluorescent protein and yellow fluorescent protein); and luminescent proteins such as luciferase, as described below. Radioactive labels include without limitation radioisotopes (radionuclides), such as ³H, ¹¹C, ¹⁴C, ¹⁸F, ³²P, ³⁵S, ⁶⁴Cu, ⁶⁸Ga, ⁸⁶Y, ⁹⁹Tc, ¹¹¹In, ¹²³I, ¹²⁴I, ¹²⁵I, ¹³¹I, ¹³³Xe, ¹⁷⁷Lu, ²¹¹At, or ²¹³Bi. Fluorescent labels include without limitation a rare earth chelate (e.g., europium chelate), rhodamine; fluorescein types including without limitation FITC, 5-carboxyfluorescein, 6-carboxy fluorescein; a rhodamine type including without limitation TAMRA; dansyl; Lissamine; cyanines; phycoerythrins; Texas Red; Cy3, Cy5, dapoxyl, NBD, Cascade Yellow, dansyl, PyMPO, pyrene, 7-diethylaminocoumarin-3-carboxylic acid and other coumarin derivatives, Marina Blue™, Pacific Blue™, Cascade Blue™, 2-anthracenesulfonyl, PyMPO, 3,4,9,10-perylene-tetracarboxylic acid, 2,7-difluorofluorescein (Oregon Green™ 488-X), 5-carboxyfluorescein, Texas Red™-X, Alexa Fluor 430, 5-carboxytetramethylrhodamine (5-TAMRA), 6-carboxytetramethylrhodamine (6-TAMRA), BODIPY FL, bimane, and Alexa Fluor 350, 405, 488, 500, 514, 532, 546, 555, 568, 594, 610, 633, 647, 660, 680, 700, and 750, and derivatives thereof, among many others. See, e.g., “The Handbook—A Guide to Fluorescent Probes and Labeling Technologies,” Tenth Edition, available on the internet at probes (dot) invitrogen (dot) com/handbook. The fluorescent label can be one or more of FAM, dRHO, 5-FAM, 6FAM, dR6G, JOE, HEX, VIC, TET, dTAMRA, TAMRA, NED, dROX, PET, BHQ, Gold540 and LIZ.

[0133] Using conventional techniques, an aptamer can be directly or indirectly labeled, e.g., the label is attached to the aptamer through biotin-streptavidin (e.g., synthesize a biotinylated aptamer, which is then capable of binding a streptavidin molecule that is itself conjugated to a detectable label; non-limiting example is streptavidin, phycoerythrin conjugated (SAPE)). Methods for chemical coupling using multiple step procedures include biotinylation, coupling of trinitrophenol (TNP) or digoxigenin using for example succinimide esters of these compounds. Biotinylation can be accomplished by, for example, the use of D-biotinyl-N-hydroxysuccinimide. Succinimide groups react effectively with amino groups at pH values above 7, and preferentially between about pH 8.0 and about pH 8.5. Alternatively, an aptamer is not labeled, but is later contacted with a second antibody that is labeled after the first antibody is bound to an antigen of interest.

[0134] Various enzyme-substrate labels may also be used in conjunction with a composition or method of the invention. Such enzyme-substrate labels are available commercially (e.g., U.S. Pat. No. 4,275,149). The enzyme generally catalyzes a chemical alteration of a chromogenic substrate that can be measured using various techniques. For example, the enzyme may catalyze a color change in a substrate, which can be measured spectrophotometrically. Alternatively, the enzyme may alter the fluorescence or chemiluminescence of the substrate. Examples of enzymatic labels include luciferases (e.g., firefly luciferase and bacterial luciferase; U.S. Pat. No. 4,737,456), luciferin, 2,3-dihydrophthalazinediones, malate dehydrogenase, urease, peroxidase such as horseradish peroxidase (HRP), alkaline phosphatase (AP), β-galactosidase, glucoamylase, lysozyme, saccharide oxidases (e.g., glucose oxidase, galactose oxidase, and glucose-6-phosphate dehydrogenase), heterocyclic oxidases (such as uricase and xanthine oxidase), lactoperoxidase, microperoxidase, and the like. Examples of enzyme-substrate combinations include, but are not limited to, horseradish peroxidase (HRP) with hydrogen peroxidase as a substrate, wherein the hydrogen peroxidase oxidizes a dye precursor (e.g., orthophenylene diamine (OPD) or 3,3′,5,5′-tetramethylbenzidine hydrochloride (TMB)); alkaline phosphatase (AP) with para-nitrophenyl phosphate as chromogenic substrate; and β-D-galactosidase (β-D-Gal) with a chromogenic substrate (e.g., p-nitrophenyl-β-D-galactosidase) or fluorogenic substrate 4-methylumbelliferyl-β-D-galactosidase.

[0135] Aptamer(s) can be linked to a substrate such as a planar substrate. A planar array generally contains addressable locations (e.g., pads, addresses, or micro-locations) of biomolecules in an array format. The size of the array will depend on the composition and end use of the array. Arrays can be made containing from 2 different molecules to many thousands. Generally, the array comprises from two to as many as 100,000 or more molecules, depending on the end use of the array and the method of manufacture. A microarray for use with the invention comprises at least one biomolecule that identifies or captures a biomarker present in a biosignature of interest, e.g., a microRNA or other biomolecule or vesicle that makes up the biosignature. In some arrays, multiple substrates are used, either of different or identical compositions. Accordingly, planar arrays may comprise a plurality of smaller substrates.

[0136] The present invention can make use of many types of arrays for detecting a biomarker, e.g., a biomarker associated with a biosignature of interest. Useful arrays or microarrays include without limitation DNA microarrays, such as cDNA microarrays, oligonucleotide microarrays and SNP microarrays, microRNA arrays, protein microarrays, antibody microarrays, tissue microarrays, cellular microarrays (also called transfection microarrays), chemical compound microarrays, and carbohydrate arrays (glycoarrays). These arrays are described in more detail above. In some embodiments, microarrays comprise biochips that provide high-density immobilized arrays of recognition molecules (e.g., aptamers or antibodies), where biomarker binding is monitored indirectly (e.g., via fluorescence).

[0137] An array or microarray that can be used to detect one or more biomarkers of a biosignature and comprising one or more aptamers of the invention can be made according to the methods described in U.S. Pat. Nos. 6,329,209; 6,365,418; 6,406,921; 6,475,808; and 6,475,809, and U.S. patent application Ser. No. 10/884,269, each of which is herein incorporated by reference in its entirety. Custom arrays to detect specific selections of sets of biomarkers described herein can be made using the methods described in these patents. Commercially available microarrays can also be used to carry out the methods of the invention, including without limitation those from Affymetrix (Santa Clara, CA), Illumina (San Diego, CA), Agilent (Santa Clara, CA), Exiqon (Denmark), or Invitrogen (Carlsbad, CA). Custom and/or commercial arrays include arrays for detection proteins, nucleic acids, and other biological molecules and entities (e.g., cells, vesicles, virii) as described herein.

[0138] In some embodiments, multiple capture molecules are disposed on an array, e.g., proteins, peptides or additional nucleic acid molecules. In certain embodiments, the proteins are immobilized using methods and materials that minimize the denaturing of the proteins, that minimize alterations in the activity of the proteins, or that minimize interactions between the protein and the surface on which they are immobilized. The capture molecules can comprise one or more aptamer of the invention. In one embodiment, an array is constructed for the hybridization of a pool of aptamers. The array can then be used to identify pool members that bind a sample, thereby facilitating characterization of a phenotype. See FIGS. 19B-19C and related disclosure for further details.

[0139] Array surfaces useful may be of any desired shape, form, or size. Non-limiting examples of surfaces include chips, continuous surfaces, curved surfaces, flexible surfaces, films, plates, sheets, or tubes. Surfaces can have areas ranging from approximately a square micron to approximately 500 cm². The area, length, and width of surfaces may be varied according to the requirements of the assay to be performed. Considerations may include, for example, ease of handling, limitations of the material(s) of which the surface is formed, requirements of detection systems, requirements of deposition systems (e.g., arrayers), or the like.

[0140] In certain embodiments, it is desirable to employ a physical means for separating groups or arrays of binding islands or immobilized biomolecules: such physical separation facilitates exposure of different groups or arrays to different solutions of interest. Therefore, in certain embodiments, arrays are situated within microwell plates having any number of wells. In such embodiments, the bottoms of the wells may serve as surfaces for the formation of arrays, or arrays may be formed on other surfaces and then placed into wells. In certain embodiments, such as where a surface without wells is used, binding islands may be formed or molecules may be immobilized on a surface and a gasket having holes spatially arranged so that they correspond to the islands or biomolecules may be placed on the surface. Such a gasket is preferably liquid tight. A gasket may be placed on a surface at any time during the process of making the array and may be removed if separation of groups or arrays is no longer desired.

[0141] In some embodiments, the immobilized molecules can bind to one or more biomarkers or vesicles present in a biological sample contacting the immobilized molecules. In some embodiments, the immobilized molecules modify or are modified by molecules present in the one or more vesicles contacting the immobilized molecules. Contacting the sample typically comprises overlaying the sample upon the array.

[0142] Modifications or binding of molecules in solution or immobilized on an array can be detected using detection techniques known in the art. Examples of such techniques include immunological techniques such as competitive binding assays and sandwich assays; fluorescence detection using instruments such as confocal scanners, confocal microscopes, or CCD-based systems and techniques such as fluorescence, fluorescence polarization (FP), fluorescence resonant energy transfer (FRET), total internal reflection fluorescence (TIRF), fluorescence correlation spectroscopy (FCS); colorimetric/spectrometric techniques; surface plasmon resonance, by which changes in mass of materials adsorbed at surfaces are measured; techniques using radioisotopes, including conventional radioisotope binding and scintillation proximity assays (SPA); mass spectroscopy, such as matrix-assisted laser desorption/ionization mass spectroscopy (MALDI) and MALDI-time of flight (TOF) mass spectroscopy; ellipsometry, which is an optical method of measuring thickness of protein films; quartz crystal microbalance (QCM), a very sensitive method for measuring mass of materials adsorbing to surfaces; scanning probe microscopies, such as atomic force microscopy (AFM), scanning force microscopy (SFM) or scanning electron microscopy (SEM); and techniques such as electrochemical, impedance, acoustic, microwave, and IR/Raman detection. See, e.g., Mere L, et al., “Miniaturized FRET assays and microfluidics: key components for ultra-high-throughput screening,” Drug Discovery Today 4(8):363-369 (1999), and references cited therein; Lakowicz J R, Principles of Fluorescence Spectroscopy, 2nd Edition, Plenum Press (1999), or Jain K K: Integrative Omics, Pharmacoproteomics, and Human Body Fluids. In: Thongboonkerd V, ed., ed. Proteomics of Human Body Fluids: Principles, Methods and Applications. Volume 1: Totowa, N.J.: Humana Press, 2007, each of which is herein incorporated by reference in its entirety.

[0143] Microarray technology can be combined with mass spectroscopy (MS) analysis and other tools. Electrospray interface to a mass spectrometer can be integrated with a capillary in a microfluidics device. For example, one commercially available system contains eTag reporters that are fluorescent labels with unique and well-defined electrophoretic mobilities; each label is coupled to biological or chemical probes via cleavable linkages. The distinct mobility address of each eTag reporter allows mixtures of these tags to be rapidly deconvoluted and quantitated by capillary electrophoresis. This system allows concurrent gene expression, protein expression, and protein function analyses from the same sample Jain K K: Integrative Omics, Pharmacoproteomics, and Human Body Fluids. In: Thongboonkerd V, ed., ed. Proteomics of Human Body Fluids: Principles, Methods and Applications. Volume 1: Totowa, N.J.: Humana Press, 2007, which is herein incorporated by reference in its entirety.

[0144] A biochip can include components for a microfluidic or nanofluidic assay. A microfluidic device can be used for isolating or analyzing biomarkers, such as determining a biosignature. Microfluidic systems allow for the miniaturization and compartmentalization of one or more processes for isolating, capturing or detecting a vesicle, detecting a microRNA, detecting a circulating biomarker, detecting a biosignature, and other processes. The microfluidic devices can use one or more detection reagents in at least one aspect of the system, and such a detection reagent can be used to detect one or more biomarkers. In one embodiment, the device detects a biomarker on an isolated or bound vesicle. Various probes, antibodies, proteins, or other binding agents can be used to detect a biomarker within the microfluidic system. The detection agents may be immobilized in different compartments of the microfluidic device or be entered into a hybridization or detection reaction through various channels of the device.

[0145] A vesicle in a microfluidic device can be lysed and its contents detected within the microfluidic device, such as proteins or nucleic acids, e.g., DNA or RNA such as miRNA or mRNA. The nucleic acid may be amplified prior to detection, or directly detected, within the microfluidic device. Thus microfluidic system can also be used for multiplexing detection of various biomarkers. In an embodiment, vesicles are captured within the microfluidic device, the captured vesicles are lysed, and a biosignature of microRNA from the vesicle payload is determined. The biosignature can further comprise the capture agent used to capture the vesicle.

[0146] Novel nanofabrication techniques are opening up the possibilities for biosensing applications that rely on fabrication of high-density, precision arrays, e.g., nucleotide-based chips and protein arrays otherwise known as heterogeneous nanoarrays. Nanofluidics allows a further reduction in the quantity of fluid analyte in a microchip to nanoliter levels, and the chips used here are referred to as nanochips. See, e. g., Unger M et al., Biotechniques 1999; 27(5):1008-14, Kartalov E P et al., Biotechniques 2006; 40(1):85-90, each of which are herein incorporated by reference in their entireties. Commercially available nanochips currently provide simple one step assays such as total cholesterol, total protein or glucose assays that can be run by combining sample and reagents, mixing and monitoring of the reaction. Gel-free analytical approaches based on liquid chromatography (LC) and nanoLC separations (Cutillas et al. Proteomics, 2005; 5:101-112 and Cutillas et al., Mol Cell Proteomics 2005; 4:1038-1051, each of which is herein incorporated by reference in its entirety) can be used in combination with the nanochips.

[0147] An array suitable for identifying a disease, condition, syndrome or physiological status can be included in a kit. A kit can include, an aptamer of the invention, including as non-limiting examples, one or more reagents useful for preparing molecules for immobilization onto binding islands or areas of an array, reagents useful for detecting binding of a vesicle to immobilized molecules, and instructions for use.

[0148] Further provided herein is a rapid detection device that facilitates the detection of a particular biosignature in a biological sample. The device can integrate biological sample preparation with polymerase chain reaction (PCR) on a chip. The device can facilitate the detection of a particular biosignature of a vesicle in a biological sample, and an example is provided as described in Pipper et al., Angewandte Chemie, 47(21), p. 3900-3904 (2008), which is herein incorporated by reference in its entirety. A biosignature can be incorporated using micro-/nano-electrochemical system (MEMS/NEMS) sensors and oral fluid for diagnostic applications as described in Li et al., Adv Dent Res 18(1): 3-5 (2005), which is herein incorporated by reference in its entirety.

### Particle Arrays

[0149] As an alternative to planar arrays, assays using particles, such as bead based assays are also capable of use with an aptamer of the invention. Aptamers are easily conjugated with commercially available beads. See, e.g., Srinivas et al. Anal. Chem. 2011 Oct. 21, Aptamer functionalized Microgel Particles for Protein Detection; See also, review article on aptamers as therapeutic and diagnostic agents, Brody and Gold, Rev. Mol. Biotech. 2000, 74:5-13.

[0150] Multiparametric assays or other high throughput detection assays using bead coatings with cognate ligands and reporter molecules with specific activities consistent with high sensitivity automation can be used. In a bead based assay system, a binding agent for a biomarker or vesicle, such as a capture agent (e.g. capture antibody), can be immobilized on an addressable microsphere. Each binding agent for each individual binding assay can be coupled to a distinct type of microsphere (i.e., microbead) and the assay reaction takes place on the surface of the microsphere, such as depicted in FIG. 2B. A binding agent for a vesicle can be a capture antibody coupled to a bead. Dyed microspheres with discrete fluorescence intensities are loaded separately with their appropriate binding agent or capture probes. The different bead sets carrying different binding agents can be pooled as desired to generate custom bead arrays. Bead arrays are then incubated with the sample in a single reaction vessel to perform the assay.

[0151] Bead-based assays can also be used with one or more aptamers of the invention. A bead substrate can provide a platform for attaching one or more binding agents, including aptamer(s). For multiplexing, multiple different bead sets (e.g., Illumina, Luminex) can have different binding agents (specific to different target molecules). For example, a bead can be conjugated to an aptamer of the invention used to detect the presence (quantitatively or qualitatively) of an antigen of interest, or it can also be used to isolate a component present in a selected biological sample (e.g., cell, cell-fragment or vesicle comprising the target molecule to which the aptamer is configured to bind or associate). Any molecule of organic origin can be successfully conjugated to a polystyrene bead through use of commercially available kits.

[0152] One or more aptamers of the invention can be used with any bead based substrate, including but not limited to magnetic capture method, fluorescence activated cell sorting (FACS) or laser cytometry. Magnetic capture methods can include, but are not limited to, the use of magnetically activated cell sorter (MACS) microbeads or magnetic columns. Examples of bead or particle based methods that can be modified to use an aptamer of the invention include methods and bead systems described in U.S. Pat. No. 4,551,435, 4,795,698, 4,925,788, 5,108,933, 5,186,827, 5,200,084 or 5,158,871; 7,399,632; 8,124,015; 8,008,019; 7,955,802; 7,445,844; 7,274,316; 6,773,812; 6,623,526; 6,599,331; 6,057,107; 5,736,330; International Patent Publication No. WO/2012/174282; WO/1993/022684.

### Flow Cytometry

[0153] Isolation or detection of circulating biomarkers, e.g., protein antigens, from a biological sample, or of the biomarker-comprising cells, cell fragments or vesicles may also be achieved using an aptamer of the invention in a cytometry process. As a non-limiting example, aptamers of the invention can be used in an assay comprising using a particle such as a bead or microsphere The invention provides aptamers as binding agents, which may be conjugated to the particle. Flow cytometry can be used for sorting microscopic particles suspended in a stream of fluid. As particles pass through they can be selectively charged and on their exit can be deflected into separate paths of flow. It is therefore possible to separate populations from an original mix, such as a biological sample, with a high degree of accuracy and speed. Flow cytometry allows simultaneous multiparametric analysis of the physical and/or chemical characteristics of single cells flowing through an optical/electronic detection apparatus. A beam of light, usually laser light, of a single frequency (color) is directed onto a hydrodynamically focused stream of fluid. A number of detectors are aimed at the point where the stream passes through the light beam; one in line with the light beam (Forward Scatter or FSC) and several perpendicular to it (Side Scatter or SSC) and one or more fluorescent detectors.

[0154] Each suspended particle passing through the beam scatters the light in some way, and fluorescent chemicals in the particle may be excited into emitting light at a lower frequency than the light source. This combination of scattered and fluorescent light is picked up by the detectors, and by analyzing fluctuations in brightness at each detector (one for each fluorescent emission peak), it is possible to deduce various facts about the physical and chemical structure of each individual particle. FSC correlates with the cell size and SSC depends on the inner complexity of the particle, such as shape of the nucleus, the amount and type of cytoplasmic granules or the membrane roughness. Some flow cytometers have eliminated the need for fluorescence and use only light scatter for measurement.

[0155] Flow cytometers can analyze several thousand particles every second in “real time” and can actively separate out and isolate particles having specified properties. They offer high-throughput automated quantification, and separation, of the set parameters for a high number of single cells during each analysis session. Flow cytometers can have multiple lasers and fluorescence detectors, allowing multiple labels to be used to more precisely specify a target population by their phenotype. Thus, a flow cytometer, such as a multicolor flow cytometer, can be used to detect one or more vesicles with multiple fluorescent labels or colors. In some embodiments, the flow cytometer can also sort or isolate different vesicle populations, such as by size or by different markers.

[0156] The flow cytometer may have one or more lasers, such as 1, 2, 3, 4, 5, 6, 7, 8, 9, 10 or more lasers. In some embodiments, the flow cytometer can detect more than one color or fluorescent label, such as at least 2, 3, 4, 5, 6, 7, 8, 9, 10, 11, 12, 13, 14, 15, 16, 17, 18, 19, or 20 different colors or fluorescent labels. For example, the flow cytometer can have at least 2, 3, 4, 5, 6, 7, 8, 9, 10, 11, 12, 13, 14, 15, 16, 17, 18, 19, or 20 fluorescence detectors.

[0157] Examples of commercially available flow cytometers that can be used to detect or analyze one or more vesicles, to sort or separate different populations of vesicles, include, but are not limited to the MoFlo™ XDP Cell Sorter (Beckman Coulter, Brea, CA), MoFlo™ Legacy Cell Sorter (Beckman Coulter, Brea, CA), BD FACSAria™ Cell Sorter (BD Biosciences, San Jose, CA), BD™ LSRII (BD Biosciences, San Jose, CA), and BD FACSCalibur™ (BD Biosciences, San Jose, CA). Use of multicolor or multi-fluor cytometers can be used in multiplex analysis of vesicles, as further described below. In some embodiments, the flow cytometer can sort, and thereby collect or sort more than one population of vesicles based one or more characteristics. For example, two populations of vesicles differ in size, such that the vesicles within each population have a similar size range and can be differentially detected or sorted. In another embodiment, two different populations of vesicles are differentially labeled.

[0158] The data resulting from flow-cytometers can be plotted in 1 dimension to produce histograms or seen in 2 dimensions as dot plots or in 3 dimensions with newer software. The regions on these plots can be sequentially separated by a series of subset extractions which are termed gates. Specific gating protocols exist for diagnostic and clinical purposes especially in relation to hematology. The plots are often made on logarithmic scales. Because different fluorescent dye's emission spectra overlap, signals at the detectors have to be compensated electronically as well as computationally. Fluorophores for labeling biomarkers may include those described in Ormerod, Flow Cytometry 2nd ed., Springer-Verlag, New York (1999), and in Nida et al., Gynecologic Oncology 2005; 4 889-894 which is incorporated herein by reference. In a multiplexed assay, including but not limited to a flow cytometry assay, one or more different target molecules can be assessed, wherein at least one of the target molecules is a microvesicle surface antigen assessed using an aptamer of the invention.

### Microfluidics

[0159] One or more aptamer of the invention can be disposed on any useful planar or bead substrate. In one aspect of the invention one or more aptamer of the invention is disposed on a microfluidic device, thereby facilitating assessing, characterizing or isolating a component of a biological sample comprising a polypeptide antigen of interest or a functional fragment thereof. For example, the circulating antigen or a cell, cell fragment or cell-derived vesicles comprising the antigen can be assessed using one or more aptamers of the invention (alternatively along with additional binding agents). Microfluidic devices, which may also be referred to as “lab-on-a-chip” systems, biomedical micro-electro-mechanical systems (bioMEMs), or multicomponent integrated systems, can be used for isolating and analyzing a vesicle. Such systems miniaturize and compartmentalize processes that allow for binding of vesicles, detection of biosignatures, and other processes.

[0160] A microfluidic device can also be used for isolation of a vesicle through size differential or affinity selection. For example, a microfluidic device can use one more channels for isolating a vesicle from a biological sample based on size or by using one or more binding agents for isolating a vesicle from a biological sample. A biological sample can be introduced into one or more microfluidic channels, which selectively allows the passage of a vesicle. The selection can be based on a property of the vesicle, such as the size, shape, deformability, or biosignature of the vesicle.

[0161] In one embodiment, a heterogeneous population of vesicles can be introduced into a microfluidic device, and one or more different homogeneous populations of vesicles can be obtained. For example, different channels can have different size selections or binding agents to select for different vesicle populations. Thus, a microfluidic device can isolate a plurality of vesicles wherein at least a subset of the plurality of vesicles comprises a different biosignature from another subset of the plurality of vesicles. For example, the microfluidic device can isolate at least 2, 3, 4, 5, 6, 7, 8, 9, 10, 15, 20, 25, 30, 40, 50, 60, 70, 80, 90, or 100 different subsets of vesicles, wherein each subset of vesicles comprises a different biosignature.

[0162] In some embodiments, the microfluidic device can comprise one or more channels that permit further enrichment or selection of a vesicle. A population of vesicles that has been enriched after passage through a first channel can be introduced into a second channel, which allows the passage of the desired vesicle or vesicle population to be further enriched, such as through one or more binding agents present in the second channel.

[0163] Array-based assays and bead-based assays can be used with microfluidic device. For example, the binding agent can be coupled to beads and the binding reaction between the beads and vesicle can be performed in a microfluidic device. Multiplexing can also be performed using a microfluidic device. Different compartments can comprise different binding agents for different populations of vesicles, where each population is of a different cell-of-origin specific vesicle population. In one embodiment, each population has a different biosignature. The hybridization reaction between the microsphere and vesicle can be performed in a microfluidic device and the reaction mixture can be delivered to a detection device. The detection device, such as a dual or multiple laser detection system can be part of the microfluidic system and can use a laser to identify each bead or microsphere by its color-coding, and another laser can detect the hybridization signal associated with each bead.

[0164] Any appropriate microfluidic device can be used in the methods of the invention. Examples of microfluidic devices that may be used, or adapted for use with vesicles, include but are not limited to those described in U.S. Pat. Nos. 7,591,936, 7,581,429, 7,579,136, 7,575,722, 7,568,399, 7,552,741, 7,544,506, 7,541,578, 7,518,726, 7,488,596, 7,485,214, 7,467,928, 7,452,713, 7,452,509, 7,449,096, 7,431,887, 7,422,725, 7,422,669, 7,419,822, 7,419,639, 7,413,709, 7,411,184, 7,402,229, 7,390,463, 7,381,471, 7,357,864, 7,351,592, 7,351,380, 7,338,637, 7,329,391, 7,323,140, 7,261,824, 7,258,837, 7,253,003, 7,238,324, 7,238,255, 7,233,865, 7,229,538, 7,201,881, 7,195,986, 7,189,581, 7,189,580, 7,189,368, 7,141,978, 7,138,062, 7,135,147, 7,125,711, 7,118,910, 7,118,661, 7,640,947, 7,666,361, 7,704,735; and International Patent Publication WO 2010/072410; each of which patents or applications are incorporated herein by reference in their entirety. Another example for use with methods disclosed herein is described in Chen et al., “Microfluidic isolation and transcriptome analysis of serum vesicles,” Lab on a Chip, Dec. 8, 2009 DOI: 10.1039/b916199f

[0165] Other microfluidic devices for use with the invention include devices comprising elastomeric layers, valves and pumps, including without limitation those disclosed in U.S. Pat. Nos. 5,376,252, 6,408,878, 6,645,432, 6,719,868, 6,793,753, 6,899,137, 6,929,030, 7,040,338, 7,118,910, 7,144,616, 7,216,671, 7,250,128, 7,494,555, 7,501,245, 7,601,270, 7,691,333, 7,754,010, 7,837,946; U.S. Patent Application Nos. 2003/0061687, 2005/0084421, 2005/0112882, 2005/0129581, 2005/0145496, 2005/0201901, 2005/0214173, 2005/0252773, 2006/0006067; and EP Patent Nos. 0527905 and 1065378; each of which application is herein incorporated by reference. In some instances, much or all of the devices are composed of elastomeric material. Certain devices are designed to conduct thermal cycling reactions (e.g., PCR) with devices that include one or more elastomeric valves to regulate solution flow through the device. The devices can comprise arrays of reaction sites thereby allowing a plurality of reactions to be performed. Thus, the devices can be used to assess circulating microRNAs in a multiplex fashion, including microRNAs isolated from vesicles. In an embodiment, the microfluidic device comprises (a) a first plurality of flow channels formed in an elastomeric substrate; (b) a second plurality of flow channels formed in the elastomeric substrate that intersect the first plurality of flow channels to define an array of reaction sites, each reaction site located at an intersection of one of the first and second flow channels; (c) a plurality of isolation valves disposed along the first and second plurality of flow channels and spaced between the reaction sites that can be actuated to isolate a solution within each of the reaction sites from solutions at other reaction sites, wherein the isolation valves comprise one or more control channels that each overlay and intersect one or more of the flow channels; and (d) means for simultaneously actuating the valves for isolating the reaction sites from each other. Various modifications to the basic structure of the device are envisioned within the scope of the invention. MicroRNAs can be detected in each of the reaction sites by using PCR methods. For example, the method can comprise the steps of the steps of: (i) providing a microfluidic device, the microfluidic device comprising: a first fluidic channel having a first end and a second end in fluid communication with each other through the channel; a plurality of flow channels, each flow channel terminating at a terminal wall; wherein each flow channel branches from and is in fluid communication with the first fluidic channel, wherein an aqueous fluid that enters one of the flow channels from the first fluidic channel can flow out of the flow channel only through the first fluidic channel; and, an inlet in fluid communication with the first fluidic channel, the inlet for introducing a sample fluid; wherein each flow channel is associated with a valve that when closed isolates one end of the flow channel from the first fluidic channel, whereby an isolated reaction site is formed between the valve and the terminal wall; a control channel; wherein each the valve is a deflectable membrane which is deflected into the flow channel associated with the valve when an actuating force is applied to the control channel, thereby closing the valve; and wherein when the actuating force is applied to the control channel a valve in each of the flow channels is closed, so as to produce the isolated reaction site in each flow channel; (ii) introducing the sample fluid into the inlet, the sample fluid filling the flow channels; (iii) actuating the valve to separate the sample fluid into the separate portions within the flow channels; (iv) amplifying the nucleic acid in the sample fluid; (v) analyzing the portions of the sample fluid to determine whether the amplifying produced the reaction. The sample fluid can contain an amplifiable nucleic acid target, e.g., a microRNA, and the conditions can be polymerase chain reaction (PCR) conditions, so that the reaction results in a PCR product being formed.

[0166] The microfluidic device can have one or more binding agents attached to a surface in a channel, or present in a channel. For example, the microchannel can have one or more capture agents, such as a capture agent for a tissue related antigen in Table 4, one or more general microvesicle antigen in Table 3 or a cell-of-origin or cancer related antigen in Table 4, including without limitation EpCam, CD9, CD63, CD81, B7H3, ICAM, STEAP, KLK2, SSX2, SSX4, PBP, SPDEF, and EGFR. The capture agent may be an aptamer selected by the methods of the invention. The surface of the channel can also be contacted with a blocking aptamer. In one embodiment, a microchannel surface is treated with avidin and a capture agent, such as an antibody, that is biotinylated can be injected into the channel to bind the avidin. In other embodiments, the capture agents are present in chambers or other components of a microfluidic device. The capture agents can also be attached to beads that can be manipulated to move through the microfluidic channels. In one embodiment, the capture agents are attached to magnetic beads. The beads can be manipulated using magnets.

[0167] A biological sample can be flowed into the microfluidic device, or a microchannel, at rates such as at least about 1, 2, 3, 4, 5, 6, 7, 8, 9, 10, 11, 12, 13, 14, 15, 16, 17, 18, 19, 20, 25, 30, 35, 40, 45, or 50 μl per minute, such as between about 1-50, 5-40, 5-30, 3-20 or 5-15 μl per minute. One or more vesicles can be captured and directly detected in the microfluidic device. Alternatively, the captured vesicle may be released and exit the microfluidic device prior to analysis. In another embodiment, one or more captured vesicles are lysed in the microchannel and the lysate can be analyzed, e.g., to examine payload within the vesicles. Lysis buffer can be flowed through the channel and lyse the captured vesicles. For example, the lysis buffer can be flowed into the device or microchannel at rates such as at least about a, 2, 3, 4, 5, 6, 7, 8, 9, 10, 11, 12, 13, 14, 15, 16, 17, 18, 19, 20, 25, 26, 27, 28, 29, 30, 35, 40, 45, or 50 μl per minute, such as between about 1-50, 5-40, 10-30, 5-30 or 10-35 μl per minute. The lysate can be collected and analyzed, such as performing RT-PCR, PCR, mass spectrometry, Western blotting, or other assays, to detect one or more biomarkers of the vesicle.

### Phenotypes

[0168] Disclosed herein are products and processes for characterizing a phenotype using the methods and compositions of the invention. The term “phenotype” as used herein can mean any trait or characteristic that is attributed to a biomarker profile that is identified using in part or in whole the compositions and/or methods of the invention. For example, a phenotype can be a diagnostic, prognostic or theranostic determination based on a characterized biomarker profile for a sample obtained from a subject. A phenotype can be any observable characteristic or trait of, such as a disease or condition, a stage of a disease or condition, susceptibility to a disease or condition, prognosis of a disease stage or condition, a physiological state, or response/potential response to therapeutics. A phenotype can result from a subject's genetic makeup as well as the influence of environmental factors and the interactions between the two, as well as from epigenetic modifications to nucleic acid sequences.

[0169] A phenotype in a subject can be characterized by obtaining a biological sample from a subject and analyzing the sample using the compositions and/or methods of the invention. For example, characterizing a phenotype for a subject or individual can include detecting a disease or condition (including pre-symptomatic early stage detecting), determining a prognosis, diagnosis, or theranosis of a disease or condition, or determining the stage or progression of a disease or condition. Characterizing a phenotype can include identifying appropriate treatments or treatment efficacy for specific diseases, conditions, disease stages and condition stages, predictions and likelihood analysis of disease progression, particularly disease recurrence, metastatic spread or disease relapse. A phenotype can also be a clinically distinct type or subtype of a condition or disease, such as a cancer or tumor. Phenotype determination can also be a determination of a physiological condition, or an assessment of organ distress or organ rejection, such as post-transplantation. The compositions and methods described herein allow assessment of a subject on an individual basis, which can provide benefits of more efficient and economical decisions in treatment.

[0170] In an aspect, the invention relates to the analysis of biomarkers such as microvesicles to provide a diagnosis, prognosis, and/or theranosis of a disease or condition. Theranostics includes diagnostic testing that provides the ability to affect therapy or treatment of a disease or disease state. Theranostics testing provides a theranosis in a similar manner that diagnostics or prognostic testing provides a diagnosis or prognosis, respectively. As used herein, theranostics encompasses any desired form of therapy related testing, including predictive medicine, personalized medicine, integrated medicine, pharmacodiagnostics and Dx/Rx partnering. Therapy related tests can be used to predict and assess drug response in individual subjects, i.e., to provide personalized medicine. Predicting a drug response can be determining whether a subject is a likely responder or a likely non-responder to a candidate therapeutic agent, e.g., before the subject has been exposed or otherwise treated with the treatment. Assessing a drug response can be monitoring a response to a drug, e.g., monitoring the subject's improvement or lack thereof over a time course after initiating the treatment. Therapy related tests are useful to select a subject for treatment who is particularly likely to benefit from the treatment or to provide an early and objective indication of treatment efficacy in an individual subject. Thus, analysis using the compositions and methods of the invention may indicate that treatment should be altered to select a more promising treatment, thereby avoiding the great expense of delaying beneficial treatment and avoiding the financial and morbidity costs of administering an ineffective drug(s).

[0171] Thus, the compositions and methods of the invention may help predict whether a subject is likely to respond to a treatment for a disease or disorder. Characterizing a phenotype includes predicting the responder/non-responder status of the subject, wherein a responder responds to a treatment for a disease and a non-responder does not respond to the treatment. Biomarkers such as microvesicles can be analyzed in the subject and compared against that of previous subjects that were known to respond or not to a treatment. If the biomarker profile in the subject more closely aligns with that of previous subjects that were known to respond to the treatment, the subject can be characterized, or predicted, as a responder to the treatment. Similarly, if the biomarker profile in the subject more closely aligns with that of previous subjects that did not respond to the treatment, the subject can be characterized, or predicted as a non-responder to the treatment. The treatment can be for any appropriate disease, disorder or other condition, including without limitation those disclosed herein.

[0172] In some embodiments, the phenotype comprises a disease or condition such as those listed in Tables 1 or 16. For example, the phenotype can comprise detecting the presence of or likelihood of developing a tumor, neoplasm, or cancer, or characterizing the tumor, neoplasm, or cancer (e.g., stage, grade, aggressiveness, likelihood of metastatis or recurrence, etc). Cancers that can be detected or assessed by methods or compositions described herein include, but are not limited to, breast cancer, ovarian cancer, lung cancer, colon cancer, hyperplastic polyp, adenoma, colorectal cancer, high grade dysplasia, low grade dysplasia, prostatic hyperplasia, prostate cancer, melanoma, pancreatic cancer, brain cancer (such as a glioblastoma), hematological malignancy, hepatocellular carcinoma, cervical cancer, endometrial cancer, head and neck cancer, esophageal cancer, gastrointestinal stromal tumor (GIST), renal cell carcinoma (RCC) or gastric cancer. The colorectal cancer can be CRC Dukes B or Dukes C-D. The hematological malignancy can be B-Cell Chronic Lymphocytic Leukemia, B-Cell Lymphoma-DLBCL, B-Cell Lymphoma-DLBCL-germinal center-like, B-Cell Lymphoma-DLBCL-activated B-cell-like, and Burkitt's lymphoma.

[0173] The phenotype can be a premalignant condition, such as actinic keratosis, atrophic gastritis, leukoplakia, erythroplasia, Lymphomatoid Granulomatosis, preleukemia, fibrosis, cervical dysplasia, uterine cervical dysplasia, xeroderma pigmentosum, Barrett's Esophagus, colorectal polyp, or other abnormal tissue growth or lesion that is likely to develop into a malignant tumor. Transformative viral infections such as HIV and HPV also present phenotypes that can be assessed according to the invention.

[0174] A cancer characterized by the methods of the invention can comprise, without limitation, a carcinoma, a sarcoma, a lymphoma or leukemia, a germ cell tumor, a blastoma, or other cancers. Carcinomas include without limitation epithelial neoplasms, squamous cell neoplasms squamous cell carcinoma, basal cell neoplasms basal cell carcinoma, transitional cell papillomas and carcinomas, adenomas and adenocarcinomas (glands), adenoma, adenocarcinoma, linitis plastica insulinoma, glucagonoma, gastrinoma, vipoma, cholangiocarcinoma, hepatocellular carcinoma, adenoid cystic carcinoma, carcinoid tumor of appendix, prolactinoma, oncocytoma, hurthle cell adenoma, renal cell carcinoma, grawitz tumor, multiple endocrine adenomas, endometrioid adenoma, adnexal and skin appendage neoplasms, mucoepidermoid neoplasms, cystic, mucinous and serous neoplasms, cystadenoma, pseudomyxoma peritonei, ductal, lobular and medullary neoplasms, acinar cell neoplasms, complex epithelial neoplasms, warthin's tumor, thymoma, specialized gonadal neoplasms, sex cord stromal tumor, thecoma, granulosa cell tumor, arrhenoblastoma, sertoli leydig cell tumor, glomus tumors, paraganglioma, pheochromocytoma, glomus tumor, nevi and melanomas, melanocytic nevus, malignant melanoma, melanoma, nodular melanoma, dysplastic nevus, lentigo maligna melanoma, superficial spreading melanoma, and malignant acral lentiginous melanoma. Sarcoma includes without limitation Askin's tumor, botryodies, chondrosarcoma, Ewing's sarcoma, malignant hemangio endothelioma, malignant schwannoma, osteosarcoma, soft tissue sarcomas including: alveolar soft part sarcoma, angiosarcoma, cystosarcoma phyllodes, dermatofibrosarcoma, desmoid tumor, desmoplastic small round cell tumor, epithelioid sarcoma, extraskeletal chondrosarcoma, extraskeletal osteosarcoma, fibrosarcoma, hemangiopericytoma, hemangiosarcoma, kaposi's sarcoma, leiomyosarcoma, liposarcoma, lymphangiosarcoma, lymphosarcoma, malignant fibrous histiocytoma, neurofibrosarcoma, rhabdomyosarcoma, and synovialsarcoma. Lymphoma and leukemia include without limitation chronic lymphocytic leukemia/small lymphocytic lymphoma, B-cell prolymphocytic leukemia, lymphoplasmacytic lymphoma (such as waldenström macroglobulinemia), splenic marginal zone lymphoma, plasma cell myeloma, plasmacytoma, monoclonal immunoglobulin deposition diseases, heavy chain diseases, extranodal marginal zone B cell lymphoma, also called malt lymphoma, nodal marginal zone B cell lymphoma (nmzl), follicular lymphoma, mantle cell lymphoma, diffuse large B cell lymphoma, mediastinal (thymic) large B cell lymphoma, intravascular large B cell lymphoma, primary effusion lymphoma, burkitt lymphoma/leukemia, T cell prolymphocytic leukemia, T cell large granular lymphocytic leukemia, aggressive NK cell leukemia, adult T cell leukemia/lymphoma, extranodal NK/T cell lymphoma, nasal type, enteropathy-type T cell lymphoma, hepatosplenic T cell lymphoma, blastic NK cell lymphoma, mycosis fungoides/sezary syndrome, primary cutaneous CD30-positive T cell lymphoproliferative disorders, primary cutaneous anaplastic large cell lymphoma, lymphomatoid papulosis, angioimmunoblastic T cell lymphoma, peripheral T cell lymphoma, unspecified, anaplastic large cell lymphoma, classical hodgkin lymphomas (nodular sclerosis, mixed cellularity, lymphocyte-rich, lymphocyte depleted or not depleted), and nodular lymphocyte-predominant hodgkin lymphoma. Germ cell tumors include without limitation germinoma, dysgerminoma, seminoma, nongerminomatous germ cell tumor, embryonal carcinoma, endodermal sinus tumor, choriocarcinoma, teratoma, polyembryoma, and gonadoblastoma. Blastoma includes without limitation nephroblastoma, medulloblastoma, and retinoblastoma. Other cancers include without limitation labial carcinoma, larynx carcinoma, hypopharynx carcinoma, tongue carcinoma, salivary gland carcinoma, gastric carcinoma, adenocarcinoma, thyroid cancer (medullary and papillary thyroid carcinoma), renal carcinoma, kidney parenchyma carcinoma, cervix carcinoma, uterine corpus carcinoma, endometrium carcinoma, chorion carcinoma, testis carcinoma, urinary carcinoma, melanoma, brain tumors such as glioblastoma, astrocytoma, meningioma, medulloblastoma and peripheral neuroectodermal tumors, gall bladder carcinoma, bronchial carcinoma, multiple myeloma, basalioma, teratoma, retinoblastoma, choroidea melanoma, seminoma, rhabdomyosarcoma, craniopharyngeoma, osteosarcoma, chondrosarcoma, myosarcoma, liposarcoma, fibrosarcoma, Ewing sarcoma, and plasmocytoma.

[0175] In a further embodiment, the cancer under analysis may be a lung cancer including non-small cell lung cancer and small cell lung cancer (including small cell carcinoma (oat cell cancer), mixed small cell/large cell carcinoma, and combined small cell carcinoma), colon cancer, breast cancer, prostate cancer, liver cancer, pancreas cancer, brain cancer, kidney cancer, ovarian cancer, stomach cancer, skin cancer, bone cancer, gastric cancer, breast cancer, pancreatic cancer, glioma, glioblastoma, hepatocellular carcinoma, papillary renal carcinoma, head and neck squamous cell carcinoma, leukemia, lymphoma, myeloma, or a solid tumor.

[0176] In embodiments, the cancer comprises an acute lymphoblastic leukemia; acute myeloid leukemia; adrenocortical carcinoma; AIDS-related cancers; AIDS-related lymphoma; anal cancer; appendix cancer; astrocytomas; atypical teratoid/rhabdoid tumor; basal cell carcinoma; bladder cancer; brain stem glioma; brain tumor (including brain stem glioma, central nervous system atypical teratoid/rhabdoid tumor, central nervous system embryonal tumors, astrocytomas, craniopharyngioma, ependymoblastoma, ependymoma, medulloblastoma, medulloepithelioma, pineal parenchymal tumors of intermediate differentiation, supratentorial primitive neuroectodermal tumors and pineoblastoma); breast cancer; bronchial tumors; Burkitt lymphoma; cancer of unknown primary site; carcinoid tumor; carcinoma of unknown primary site; central nervous system atypical teratoid/rhabdoid tumor; central nervous system embryonal tumors; cervical cancer; childhood cancers; chordoma; chronic lymphocytic leukemia; chronic myelogenous leukemia; chronic myeloproliferative disorders; colon cancer; colorectal cancer; craniopharyngioma; cutaneous T-cell lymphoma; endocrine pancreas islet cell tumors; endometrial cancer; ependymoblastoma; ependymoma; esophageal cancer; esthesioneuroblastoma; Ewing sarcoma; extracranial germ cell tumor; extragonadal germ cell tumor; extrahepatic bile duct cancer; gallbladder cancer; gastric (stomach) cancer; gastrointestinal carcinoid tumor; gastrointestinal stromal cell tumor; gastrointestinal stromal tumor (GIST); gestational trophoblastic tumor; glioma; hairy cell leukemia; head and neck cancer; heart cancer; Hodgkin lymphoma; hypopharyngeal cancer; intraocular melanoma; islet cell tumors; Kaposi sarcoma; kidney cancer; Langerhans cell histiocytosis; laryngeal cancer; lip cancer; liver cancer; malignant fibrous histiocytoma bone cancer; medulloblastoma; medulloepithelioma; melanoma; Merkel cell carcinoma; Merkel cell skin carcinoma; mesothelioma; metastatic squamous neck cancer with occult primary; mouth cancer; multiple endocrine neoplasia syndromes; multiple myeloma; multiple myeloma/plasma cell neoplasm; mycosis fungoides; myelodysplastic syndromes; myeloproliferative neoplasms; nasal cavity cancer; nasopharyngeal cancer; neuroblastoma; Non-Hodgkin lymphoma; nonmelanoma skin cancer; non-small cell lung cancer; oral cancer; oral cavity cancer; oropharyngeal cancer; osteosarcoma; other brain and spinal cord tumors; ovarian cancer; ovarian epithelial cancer; ovarian germ cell tumor; ovarian low malignant potential tumor; pancreatic cancer; papillomatosis; paranasal sinus cancer; parathyroid cancer; pelvic cancer; penile cancer; pharyngeal cancer; pineal parenchymal tumors of intermediate differentiation; pineoblastoma; pituitary tumor; plasma cell neoplasm/multiple myeloma; pleuropulmonary blastoma; primary central nervous system (CNS) lymphoma; primary hepatocellular liver cancer; prostate cancer; rectal cancer; renal cancer; renal cell (kidney) cancer; renal cell cancer; respiratory tract cancer; retinoblastoma; rhabdomyosarcoma; salivary gland cancer; Sézary syndrome; small cell lung cancer; small intestine cancer; soft tissue sarcoma; squamous cell carcinoma; squamous neck cancer; stomach (gastric) cancer; supratentorial primitive neuroectodermal tumors; T-cell lymphoma; testicular cancer; throat cancer; thymic carcinoma; thymoma; thyroid cancer; transitional cell cancer; transitional cell cancer of the renal pelvis and ureter; trophoblastic tumor; ureter cancer; urethral cancer; uterine cancer; uterine sarcoma; vaginal cancer; vulvar cancer; Waldenström macroglobulinemia; or Wilm's tumor. The methods of the invention can be used to characterize these and other cancers. Thus, characterizing a phenotype can be providing a diagnosis, prognosis or theranosis of one of the cancers disclosed herein.

[0177] In some embodiments, the cancer comprises an acute myeloid leukemia (AML), breast carcinoma, cholangiocarcinoma, colorectal adenocarcinoma, extrahepatic bile duct adenocarcinoma, female genital tract malignancy, gastric adenocarcinoma, gastroesophageal adenocarcinoma, gastrointestinal stromal tumors (GIST), glioblastoma, head and neck squamous carcinoma, leukemia, liver hepatocellular carcinoma, low grade glioma, lung bronchioloalveolar carcinoma (BAC), lung non-small cell lung cancer (NSCLC), lung small cell cancer (SCLC), lymphoma, male genital tract malignancy, malignant solitary fibrous tumor of the pleura (MSFT), melanoma, multiple myeloma, neuroendocrine tumor, nodal diffuse large B-cell lymphoma, non epithelial ovarian cancer (non-EOC), ovarian surface epithelial carcinoma, pancreatic adenocarcinoma, pituitary carcinomas, oligodendroglioma, prostatic adenocarcinoma, retroperitoneal or peritoneal carcinoma, retroperitoneal or peritoneal sarcoma, small intestinal malignancy, soft tissue tumor, thymic carcinoma, thyroid carcinoma, or uveal melanoma. The methods of the invention can be used to characterize these and other cancers. Thus, characterizing a phenotype can be providing a diagnosis, prognosis or theranosis of one of the cancers disclosed herein.

[0178] The phenotype can also be an inflammatory disease, immune disease, or autoimmune disease. For example, the disease may be inflammatory bowel disease (IBD), Crohn's disease (CD), ulcerative colitis (UC), pelvic inflammation, vasculitis, psoriasis, diabetes, autoimmune hepatitis, Multiple Sclerosis, Myasthenia Gravis, Type I diabetes, Rheumatoid Arthritis, Psoriasis, Systemic Lupus Erythematosis (SLE), Hashimoto's Thyroiditis, Grave's disease, Ankylosing Spondylitis Sjogrens Disease, CREST syndrome, Scleroderma, Rheumatic Disease, organ rejection, Primary Sclerosing Cholangitis, or sepsis.

[0179] The phenotype can also comprise a cardiovascular disease, such as atherosclerosis, congestive heart failure, vulnerable plaque, stroke, or ischemia. The cardiovascular disease or condition can be high blood pressure, stenosis, vessel occlusion or a thrombotic event.

[0180] The phenotype can also comprise a neurological disease, such as Multiple Sclerosis (MS), Parkinson's Disease (PD), Alzheimer's Disease (AD), schizophrenia, bipolar disorder, depression, autism, Prion Disease, Pick's disease, dementia, Huntington disease (HD), Down's syndrome, cerebrovascular disease, Rasmussen's encephalitis, viral meningitis, neurospsychiatric systemic lupus erythematosus (NPSLE), amyotrophic lateral sclerosis, Creutzfeldt-Jacob disease, Gerstmann-Straussler-Scheinker disease, transmissible spongiform encephalopathy, ischemic reperfusion damage (e.g. stroke), brain trauma, microbial infection, or chronic fatigue syndrome. The phenotype may also be a condition such as fibromyalgia, chronic neuropathic pain, or peripheral neuropathic pain.

[0181] The phenotype may also comprise an infectious disease, such as a bacterial, viral or yeast infection. For example, the disease or condition may be Whipple's Disease, Prion Disease, cirrhosis, methicillin-resistant Staphylococcus aureus, HIV, hepatitis, syphilis, meningitis, malaria, tuberculosis, or influenza. Viral proteins, such as HIV or HCV-like particles can be assessed in a vesicle, to characterize a viral condition.

[0182] The phenotype can also comprise a perinatal or pregnancy related condition (e.g. preeclampsia or preterm birth), metabolic disease or condition, such as a metabolic disease or condition associated with iron metabolism. For example, hepcidin can be assayed in a vesicle to characterize an iron deficiency. The metabolic disease or condition can also be diabetes, inflammation, or a perinatal condition.

[0183] The compositions and methods of the invention can be used to characterize these and other diseases and disorders that can be assessed via biomarkers. Thus, characterizing a phenotype can be providing a diagnosis, prognosis or theranosis of one of the diseases and disorders disclosed herein.

### Subject

[0184] One or more phenotypes of a subject can be determined by analyzing one or more vesicles, such as vesicles, in a biological sample obtained from the subject. A subject or patient can include, but is not limited to, mammals such as bovine, avian, canine, equine, feline, ovine, porcine, or primate animals (including humans and non-human primates). A subject can also include a mammal of importance due to being endangered, such as a Siberian tiger; or economic importance, such as an animal raised on a farm for consumption by humans, or an animal of social importance to humans, such as an animal kept as a pet or in a zoo. Examples of such animals include, but are not limited to, carnivores such as cats and dogs; swine including pigs, hogs and wild boars; ruminants or ungulates such as cattle, oxen, sheep, giraffes, deer, goats, bison, camels or horses. Also included are birds that are endangered or kept in zoos, as well as fowl and more particularly domesticated fowl, i.e. poultry, such as turkeys and chickens, ducks, geese, guinea fowl. Also included are domesticated swine and horses (including race horses). In addition, any animal species connected to commercial activities are also included such as those animals connected to agriculture and aquaculture and other activities in which disease monitoring, diagnosis, and therapy selection are routine practice in husbandry for economic productivity and/or safety of the food chain.

[0185] The subject can have a pre-existing disease or condition, such as cancer. Alternatively, the subject may not have any known pre-existing condition. The subject may also be non-responsive to an existing or past treatment, such as a treatment for cancer.

### Samples

[0186] A sample used and/or assessed via the compositions and methods of the invention includes any relevant biological sample that can be used for biomarker assessment, including without limitation sections of tissues such as biopsy or tissue removed during surgical or other procedures, bodily fluids, autopsy samples, frozen sections taken for histological purposes, and cell cultures. Such samples include blood and blood fractions or products (e.g., serum, buffy coat, plasma, platelets, red blood cells, and the like), sputum, malignant effusion, cheek cells tissue, cultured cells (e.g., primary cultures, explants, and transformed cells), stool, urine, other biological or bodily fluids (e.g., prostatic fluid, gastric fluid, intestinal fluid, renal fluid, lung fluid, cerebrospinal fluid, and the like), etc. The sample can comprise biological material that is a fresh frozen & formalin fixed paraffin embedded (FFPE) block, formalin-fixed paraffin embedded, or is within an RNA preservative+formalin fixative. More than one sample of more than one type can be used for each patient.

[0187] The sample used in the methods described herein can be a formalin fixed paraffin embedded (FFPE) sample. The FFPE sample can be one or more of fixed tissue, unstained slides, bone marrow core or clot, core needle biopsy, malignant fluids and fine needle aspirate (FNA). In an embodiment, the fixed tissue comprises a tumor containing formalin fixed paraffin embedded (FFPE) block from a surgery or biopsy. In another embodiment, the unstained slides comprise unstained, charged, unbaked slides from a paraffin block. In another embodiment, bone marrow core or clot comprises a decalcified core. A formalin fixed core and/or clot can be paraffin-embedded. In still another embodiment, the core needle biopsy comprises 1, 2, 3, 4, 5, 6, 7, 8, 9, 10 or more, e.g., 3-4, paraffin embedded biopsy samples. An 18 gauge needle biopsy can be used. The malignant fluid can comprise a sufficient volume of fresh pleural/ascitic fluid to produce a 5×5×2 mm cell pellet. The fluid can be formalin fixed in a paraffin block. In an embodiment, the core needle biopsy comprises 1, 2, 3, 4, 5, 6, 7, 8, 9, 10 or more, e.g., 4-6, paraffin embedded aspirates.

[0188] A sample may be processed according to techniques understood by those in the art. A sample can be without limitation fresh, frozen or fixed cells or tissue. In some embodiments, a sample comprises formalin-fixed paraffin-embedded (FFPE) tissue, fresh tissue or fresh frozen (FF) tissue. A sample can comprise cultured cells, including primary or immortalized cell lines derived from a subject sample. A sample can also refer to an extract from a sample from a subject. For example, a sample can comprise DNA, RNA or protein extracted from a tissue or a bodily fluid. Many techniques and commercial kits are available for such purposes. The fresh sample from the individual can be treated with an agent to preserve RNA prior to further processing, e.g., cell lysis and extraction. Samples can include frozen samples collected for other purposes. Samples can be associated with relevant information such as age, gender, and clinical symptoms present in the subject; source of the sample; and methods of collection and storage of the sample. A sample is typically obtained from a subject.

[0189] A biopsy comprises the process of removing a tissue sample for diagnostic or prognostic evaluation, and to the tissue specimen itself. Any biopsy technique known in the art can be applied to the molecular profiling methods of the present invention. The biopsy technique applied can depend on the tissue type to be evaluated (e.g., colon, prostate, kidney, bladder, lymph node, liver, bone marrow, blood cell, lung, breast, etc.), the size and type of the tumor (e.g., solid or suspended, blood or ascites), among other factors. Representative biopsy techniques include, but are not limited to, excisional biopsy, incisional biopsy, needle biopsy, surgical biopsy, and bone marrow biopsy. An “excisional biopsy” refers to the removal of an entire tumor mass with a small margin of normal tissue surrounding it. An “incisional biopsy” refers to the removal of a wedge of tissue that includes a cross-sectional diameter of the tumor. Molecular profiling can use a “core-needle biopsy” of the tumor mass, or a “fine-needle aspiration biopsy” which generally obtains a suspension of cells from within the tumor mass. Biopsy techniques are discussed, for example, in Harrison's Principles of Internal Medicine, Kasper, et al., eds., 16th ed., 2005, Chapter 70, and throughout Part V.

[0190] Standard molecular biology techniques known in the art and not specifically described are generally followed as in Sambrook et al., Molecular Cloning: A Laboratory Manual, Cold Spring Harbor Laboratory Press, New York (1989), and as in Ausubel et al., Current Protocols in Molecular Biology, John Wiley and Sons, Baltimore, Md. (1989) and as in Perbal, A Practical Guide to Molecular Cloning, John Wiley & Sons, New York (1988), and as in Watson et al., Recombinant DNA, Scientific American Books, New York and in Birren et al (eds) Genome Analysis: A Laboratory Manual Series, Vols. 1-4 Cold Spring Harbor Laboratory Press, New York (1998) and methodology as set forth in U.S. Pat. Nos. 4,666,828; 4,683,202; 4,801,531; 5,192,659 and 5,272,057 and incorporated herein by reference. Polymerase chain reaction (PCR) can be carried out generally as in PCR Protocols: A Guide to Methods and Applications, Academic Press, San Diego, Calif. (1990).

[0191] The biological sample assessed using the compositions and methods of the invention can be any useful bodily or biological fluid, including but not limited to peripheral blood, sera, plasma, ascites, urine, cerebrospinal fluid (CSF), sputum, saliva, bone marrow, synovial fluid, aqueous humor, amniotic fluid, cerumen, breast milk, broncheoalveolar lavage fluid, semen (including prostatic fluid), Cowper's fluid or pre-ejaculatory fluid, female ejaculate, sweat, fecal matter, hair, tears, cyst fluid, pleural and peritoneal fluid, pericardial fluid, lymph, chyme, chyle, bile, interstitial fluid, menses, pus, sebum, vomit, vaginal secretions, mucosal secretion, stool water, pancreatic juice, lavage fluids from sinus cavities, bronchopulmonary aspirates or other lavage fluids, cells, cell culture, or a cell culture supernatant. A biological sample may also include the blastocyl cavity, umbilical cord blood, or maternal circulation which may be of fetal or maternal origin. The biological sample may also be a cell culture, tissue sample or biopsy from which vesicles and other circulating biomarkers may be obtained. For example, cells of interest can be cultured and vesicles isolated from the culture. In various embodiments, biomarkers or more particularly biosignatures disclosed herein can be assessed directly from such biological samples (e.g., identification of presence or levels of nucleic acid or polypeptide biomarkers or functional fragments thereof) using various methods, such as extraction of nucleic acid molecules from blood, plasma, serum or any of the foregoing biological samples, use of protein or antibody arrays to identify polypeptide (or functional fragment) biomarker(s), as well as other array, sequencing, PCR and proteomic techniques known in the art for identification and assessment of nucleic acid and polypeptide molecules. In addition, one or more components present in such samples can be first isolated or enriched and further processed to assess the presence or levels of selected biomarkers, to assess a given biosignature (e.g., isolated microvesicles prior to profiling for protein and/or nucleic acid biomarkers).

[0192] Table 1 presents a non-limiting listing of diseases, conditions, or biological states and corresponding biological samples that may be used for analysis according to the methods of the invention.

TABLE 1
Examples of Biological Samples for Various Diseases, Conditions, or Biological States

| Illustrative Disease, Condition or Biological | |
|---|---|
| State | Illustrative Biological Samples |
| Cancers/neoplasms affecting the following tissue | Tumor, blood, serum, plasma, cerebrospinal fluid |
| types/bodily systems: breast, lung, ovarian, colon, | (CSF), urine, sputum, ascites, synovial fluid, |
| rectal, prostate, pancreatic, brain, bone, connective | semen, nipple aspirates, saliva, bronchoalveolar |
| tissue, glands, skin, lymph, nervous system, | lavage fluid, tears, oropharyngeal washes, feces, |
| endocrine, germ cell, genitourinary, | peritoneal fluids, pleural effusion, sweat, tears, |
| hematologic/blood, bone marrow, muscle, eye, | aqueous humor, pericardial fluid, lymph, chyme, |
| esophageal, fat tissue, thyroid, pituitary, spinal | chyle, bile, stool water, amniotic fluid, breast |
| cord, bile duct, heart, gall bladder, bladder, testes, | milk, pancreatic juice, cerumen, Cowper's fluid or |
| cervical, endometrial, renal, ovarian, | pre-ejaculatory fluid, female ejaculate, interstitial |
| digestive/gastrointestinal, stomach, head and neck, | fluid, menses, mucus, pus, sebum, vaginal |
| liver, leukemia, respiratory/thorasic, cancers of | lubrication, vomit |
| unknown primary (CUP) | |
| Neurodegenerative neurological disorders: | Blood, serum, plasma, CSF, urine |
| Parkinson's disease, Alzheimer's Disease and | |
| multiple sclerosis, Schizophrenia, and bipolar | |
| disorder, spasticity disorders, epilepsy | |
| Cardiovascular Disease: atherosclerosis, | Blood, serum, plasma, CSF, urine |
| cardiomyopathy, endocarditis, vunerable plaques, | |
| infection | |
| Stroke: ischemic, intracerebral hemorrhage, | Blood, serum, plasma, CSF, urine |
| subarachnoid hemorrhage, transient ischemic | |
| attacks (TIA) | |
| Pain disorders: peripheral neuropathic pain and | Blood, serum, plasma, CSF, urine |
| chronic neuropathic pain, and fibromyalgia, | |
| Autoimmune disease: systemic and localized | Blood, serum, plasma, CSF, urine, synovial fluid |
| diseases, rheumatic disease, Lupus, Sjogren's | |
| syndrome | |
| Digestive system abnormalities: Barrett's | Blood, serum, plasma, CSF, urine |
| esophagus, irritable bowel syndrome, ulcerative | |
| colitis, Crohn's disease, Diverticulosis and | |
| Diverticulitis, Celiac Disease | |
| Endocrine disorders: diabetes mellitus, various | Blood, serum, plasma, CSF, urine |
| forms of Thyroiditis, adrenal disorders, pituitary | |
| disorders | |
| Diseases and disorders of the skin: psoriasis | Blood, serum, plasma, CSF, urine, synovial fluid, |
| | tears |
| Urological disorders: benign prostatic | Blood, serum, plasma, urine |
| hypertrophy (BPH), polycystic kidney disease, | |
| interstitial cystitis | |
| Hepatic disease/injury: Cirrhosis, induced | Blood, serum, plasma, urine |
| hepatotoxicity (due to exposure to natural or | |
| synthetic chemical sources) | |
| Kidney disease/injury: acute, sub-acute, chronic | Blood, serum, plasma, urine |
| conditions, Podocyte injury, focal segmental | |
| glomerulosclerosis | |
| Endometriosis | Blood, serum, plasma, urine, vaginal fluids |
| Osteoporosis | Blood, serum, plasma, urine, synovial fluid |
| Pancreatitis | Blood, serum, plasma, urine, pancreatic juice |
| Asthma | Blood, serum, plasma, urine, sputum, bronchiolar |
| | lavage fluid |
| Allergies | Blood, serum, plasma, urine, sputum, bronchiolar |
| | lavage fluid |
| Prion-related diseases | Blood, serum, plasma, CSF, urine |
| Viral Infections: HIV/AIDS | Blood, serum, plasma, urine |
| Sepsis | Blood, serum, plasma, urine, tears, nasal lavage |
| Organ rejection/transplantation | Blood, serum, plasma, urine, various lavage fluids |
| Differentiating conditions: adenoma versus | Blood, serum, plasma, urine, sputum, feces, |
| hyperplastic polyp, irritable bowel syndrome | colonic lavage fluid |
| (IBS) versus normal, classifying Dukes stages A, | |
| B, C, and/or D of colon cancer, adenoma with | |
| low-grade hyperplasia versus high-grade | |
| hyperplasia, adenoma versus normal, colorectal | |
| cancer versus normal, IBS versus. ulcerative | |
| colitis (UC) versus Crohn's disease (CD), | |
| Pregnancy related physiological states, | Maternal serum, plasma, amniotic fluid, cord |
| conditions, or affiliated diseases: genetic risk, | blood |
| adverse pregnancy outcomes | |

[0193] The methods of the invention can be used to characterize a phenotype using a blood sample or blood derivative. Blood derivatives include plasma and serum. Blood plasma is the liquid component of whole blood, and makes up approximately 55% of the total blood volume. It is composed primarily of water with small amounts of minerals, salts, ions, nutrients, and proteins in solution. In whole blood, red blood cells, leukocytes, and platelets are suspended within the plasma. Blood serum refers to blood plasma without fibrinogen or other clotting factors (i.e., whole blood minus both the cells and the clotting factors).

[0194] The biological sample may be obtained through a third party, such as a party not performing the analysis of the biomarkers, whether direct assessment of a biological sample or by profiling one or more vesicles obtained from the biological sample. For example, the sample may be obtained through a clinician, physician, or other health care manager of a subject from which the sample is derived. Alternatively, the biological sample may obtained by the same party analyzing the vesicle. In addition, biological samples be assayed, are archived (e.g., frozen) or ortherwise stored in under preservative conditions.

[0195] Furthermore, a biological sample can comprise a vesicle or cell membrane fragment that is derived from a cell of origin and available extracellularly in a subject's biological fluid or extracellular milieu.

[0196] Methods of the invention can include assessing one or more vesicles, including assessing vesicle populations. A vesicle, as used herein, is a membrane vesicle that is shed from cells. Vesicles or membrane vesicles include without limitation: circulating microvesicles (cMVs), microvesicle, exosome, nanovesicle, dexosome, bleb, blebby, prostasome, microparticle, intralumenal vesicle, membrane fragment, intralumenal endosomal vesicle, endosomal-like vesicle, exocytosis vehicle, endosome vesicle, endosomal vesicle, apoptotic body, multivesicular body, secretory vesicle, phospholipid vesicle, liposomal vesicle, argosome, texasome, secresome, tolerosome, melanosome, oncosome, or exocytosed vehicle. Furthermore, although vesicles may be produced by different cellular processes, the methods of the invention are not limited to or reliant on any one mechanism, insofar as such vesicles are present in a biological sample and are capable of being characterized by the methods disclosed herein. Unless otherwise specified, methods that make use of a species of vesicle can be applied to other types of vesicles. Vesicles comprise spherical structures with a lipid bilayer similar to cell membranes which surrounds an inner compartment which can contain soluble components, sometimes referred to as the payload. In some embodiments, the methods of the invention make use of exosomes, which are small secreted vesicles of about 40-100 nm in diameter. For a review of membrane vesicles, including types and characterizations, see Thery et al., Nat Rev Immunol. 2009 August; 9(8): 581-93. Some properties of different types of vesicles include those in Table 2:

TABLE 2
Vesicle Properties

| | | | | | | | Membrane | | Exosome- | | Apoptotic | |
|---|---|---|---|---|---|---|---|---|---|---|---|---|
| Feature | Exosomes | | Microvesicles | | Ectosomes | | particles | | like vesicles | | vesicles | |
| Size | 50-100 | nm | 100-1,000 | nm | 50-200 | nm | 50-80 | nm | 20-50 | nm | 50-500 | nm |

| | | | | | | | | |
|---|---|---|---|---|---|---|---|---|
| Density in | 1.13-1.19 | g/ml | 1.04-1.07 | g/ml | 1.1 | g/ml | 1.16-1.28 | g/ml |
| sucrose | | | | | | | | |

| EM | Cup shape | | Irregular | | Bilamellar | | Round | | Irregular | | Heterogeneous |
|---|---|---|---|---|---|---|---|---|---|---|---|
| appearance | | | shape, | | round | | | | shape | | |
| | | | electron | | structures | | | | | | |
| | | | dense | | | | | | | | |
| Sedimentation | 100,000 | g | 10,000 | g | 160,000-200,000 | g | 100,000-200,000 | g | 175,000 | g | 1,200 g, |
| | | | | | | | | | | | 10,000 g, |
| | | | | | | | | | | | 100,000 g |

| | | | | | | |
|---|---|---|---|---|---|---|
| Lipid | Enriched in | Expose PPS | Enriched in | | No lipid | |
| composition | cholesterol, | | cholesterol | | rafts | |
| | sphingomyelin | | and | | | |
| | and ceramide; | | diacylglycerol; | | | |
| | contains lipid | | expose PPS | | | |
| | rafts; expose | | | | | |
| | PPS | | | | | |
| Major protein | Tetraspanins | Integrins, | CR1 and | CD133; no | TNFRI | Histones |
| markers | (e.g., CD63, | selectins and | proteolytic | CD63 | | |
| | CD9), Alix, | CD40 ligand | enzymes; no | | | |
| | TSG101 | | CD63 | | | |
| Intracellular | Internal | Plasma | Plasma | Plasma | | |
| origin | compartments | membrane | membrane | membrane | | |
| | (endosomes) | | | | | |

Abbreviations:
phosphatidylserine (PPS);
electron microscopy (EM)

[0197] Vesicles include shed membrane bound particles, or “microparticles,” that are derived from either the plasma membrane or an internal membrane. Vesicles can be released into the extracellular environment from cells. Cells releasing vesicles include without limitation cells that originate from, or are derived from, the ectoderm, endoderm, or mesoderm. The cells may have undergone genetic, environmental, and/or any other variations or alterations. For example, the cell can be tumor cells. A vesicle can reflect any changes in the source cell, and thereby reflect changes in the originating cells, e.g., cells having various genetic mutations. In one mechanism, a vesicle is generated intracellularly when a segment of the cell membrane spontaneously invaginates and is ultimately exocytosed (see for example, Keller et al., Immunol. Lett. 107 (2): 102-8 (2006)). Vesicles also include cell-derived structures bounded by a lipid bilayer membrane arising from both herniated evagination (blebbing) separation and sealing of portions of the plasma membrane or from the export of any intracellular membrane-bounded vesicular structure containing various membrane-associated proteins of tumor origin, including surface-bound molecules derived from the host circulation that bind selectively to the tumor-derived proteins together with molecules contained in the vesicle lumen, including but not limited to tumor-derived microRNAs or intracellular proteins. Blebs and blebbing are further described in Charras et al., Nature Reviews Molecular and Cell Biology, Vol. 9, No. 11, p. 730-736 (2008). A vesicle shed into circulation or bodily fluids from tumor cells may be referred to as a “circulating tumor-derived vesicle.” When such vesicle is an exosome, it may be referred to as a circulating-tumor derived exosome (CTE). In some instances, a vesicle can be derived from a specific cell of origin. CTE, as with a cell-of-origin specific vesicle, typically have one or more unique biomarkers that permit isolation of the CTE or cell-of-origin specific vesicle, e.g., from a bodily fluid and sometimes in a specific manner. For example, a cell or tissue specific markers are used to identify the cell of origin. Examples of such cell or tissue specific markers are disclosed herein and can further be accessed in the Tissue-specific Gene Expression and Regulation (TiGER) Database, available at bioinfo.wilmer.jhu.edu/tiger/; Liu et al. (2008) TiGER: a database for tissue-specific gene expression and regulation. BMC Bioinformatics. 9:271; TissueDistributionDBs, available at genome.dkfz-heidelberg.de/menu/tissue_db/index.html.

[0198] A vesicle can have a diameter of greater than about 10 nm, 20 nm, or 30 nm. A vesicle can have a diameter of greater than 40 nm, 50 nm, 100 nm, 200 nm, 500 nm, 1000 nm, 1500 nm, 2000 nm or greater than 10,000 nm. A vesicle can have a diameter of about 20-2000 nm, about 20-1500 nm, about 30-1000 nm, about 30-800 nm, about 30-200 nm, or about 30-100 nm. In some embodiments, the vesicle has a diameter of less than 10,000 nm, 2000 nm, 1500 nm, 1000 nm, 800 nm, 500 nm, 200 nm, 100 nm, 50 nm, 40 nm, 30 nm, 20 nm or less than 10 nm. As used herein the term “about” in reference to a numerical value means that variations of 10% above or below the numerical value are within the range ascribed to the specified value. Typical sizes for various types of vesicles are shown in Table 2. Vesicles can be assessed to measure the diameter of a single vesicle or any number of vesicles. For example, the range of diameters of a vesicle population or an average diameter of a vesicle population can be determined. Vesicle diameter can be assessed using methods known in the art, e.g., imaging technologies such as electron microscopy. In an embodiment, a diameter of one or more vesicles is determined using optical particle detection. See, e.g., U.S. Pat. No. 7,751,053, entitled “Optical Detection and Analysis of Particles” and issued Jul. 6, 2010; and U.S. Pat. No. 7,399,600, entitled “Optical Detection and Analysis of Particles” and issued Jul. 15, 2010.

[0199] In some embodiments, the methods of the invention comprise assessing vesicles directly such as in a biological sample without prior isolation, purification, or concentration from the biological sample. For example, the amount of vesicles in the sample can by itself provide a biosignature that provides a diagnostic, prognostic or theranostic determination. Alternatively, the vesicle in the sample may be isolated, captured, purified, or concentrated from a sample prior to analysis. As noted, isolation, capture or purification as used herein comprises partial isolation, partial capture or partial purification apart from other components in the sample. Vesicle isolation can be performed using various techniques as described herein, e.g., chromatography, filtration, centrifugation, flow cytometry, affinity capture (e.g., to a planar surface or bead), and/or using microfluidics. FIGS. 19B-C present an overview of a method of the invention for assessing microvesicles using an aptamer pool.

[0200] Vesicles such as exosomes can be assessed to provide a phenotypic characterization by comparing vesicle characteristics to a reference. In some embodiments, surface antigens on a vesicle are assessed. The surface antigens can provide an indication of the anatomical origin and/or cellular of the vesicles and other phenotypic information, e.g., tumor status. For example, wherein vesicles found in a patient sample, e.g., a bodily fluid such as blood, serum or plasma, are assessed for surface antigens indicative of colorectal origin and the presence of cancer. The surface antigens may comprise any informative biological entity that can be detected on the vesicle membrane surface, including without limitation surface proteins, lipids, carbohydrates, and other membrane components. For example, positive detection of colon derived vesicles expressing tumor antigens can indicate that the patient has colorectal cancer. As such, methods of the invention can be used to characterize any disease or condition associated with an anatomical or cellular origin, by assessing, for example, disease-specific and cell-specific biomarkers of one or more vesicles obtained from a subject.

[0201] In another embodiment, the methods of the invention comprise assessing one or more vesicle payload to provide a phenotypic characterization. The payload with a vesicle comprises any informative biological entity that can be detected as encapsulated within the vesicle, including without limitation proteins and nucleic acids, e.g., genomic or cDNA, mRNA, or functional fragments thereof, as well as microRNAs (miRs). In addition, methods of the invention are directed to detecting vesicle surface antigens (in addition or exclusive to vesicle payload) to provide a phenotypic characterization. For example, vesicles can be characterized by using binding agents (e.g., antibodies or aptamers) that are specific to vesicle surface antigens, and the bound vesicles can be further assessed to identify one or more payload components disclosed therein. As described herein, the levels of vesicles with surface antigens of interest or with payload of interest can be compared to a reference to characterize a phenotype. For example, overexpression in a sample of cancer-related surface antigens or vesicle payload, e.g., a tumor associated mRNA or microRNA, as compared to a reference, can indicate the presence of cancer in the sample. The biomarkers assessed can be present or absent, increased or reduced based on the selection of the desired target sample and comparison of the target sample to the desired reference sample. Non-limiting examples of target samples include: disease; treated/not-treated; different time points, such as a in a longitudinal study; and non-limiting examples of reference sample: non-disease; normal; different time points; and sensitive or resistant to candidate treatment(s).

### Microvesicle Isolation and Analysis

### Sample Processing

[0202] A vesicle or a population of vesicles may be isolated, purified, concentrated or otherwise enriched prior to and/or during analysis. Unless otherwise specified, the terms “purified,” “isolated,” or similar as used herein in reference to vesicles or biomarker components are intended to include partial or complete purification or isolation of such components from a cell or organism. Analysis of a vesicle can include quantitating the amount one or more vesicle populations of a biological sample. For example, a heterogeneous population of vesicles can be quantitated, or a homogeneous population of vesicles, such as a population of vesicles with a particular biomarker profile, a particular biosignature, or derived from a particular cell type can be isolated from a heterogeneous population of vesicles and quantitated. Analysis of a vesicle can also include detecting, quantitatively or qualitatively, one or more particular biomarker profile or biosignature of a vesicle, as described herein.

[0203] A vesicle can be stored and archived, such as in a bio-fluid bank and retrieved for analysis as desired. A vesicle may also be isolated from a biological sample that has been previously harvested and stored from a living or deceased subject. In addition, a vesicle may be isolated from a biological sample which has been collected as described in King et al., Breast Cancer Res 7(5): 198-204 (2005). A vesicle can be isolated from an archived or stored sample. Alternatively, a vesicle may be isolated from a biological sample and analyzed without storing or archiving of the sample. Furthermore, a third party may obtain or store the biological sample, or obtain or store the vesicle for analysis.

[0204] An enriched population of vesicles can be obtained from a biological sample. For example, vesicles may be concentrated or isolated from a biological sample using size exclusion chromatography, density gradient centrifugation, differential centrifugation, nanomembrane ultrafiltration, immunoabsorbent capture, affinity purification, microfluidic separation, or combinations thereof.

[0205] Size exclusion chromatography, such as gel permeation columns, centrifugation or density gradient centrifugation, and filtration methods can be used. For example, a vesicle can be isolated by differential centrifugation, anion exchange and/or gel permeation chromatography (for example, as described in U.S. Pat. Nos. 6,899,863 and 6,812,023), sucrose density gradients, organelle electrophoresis (for example, as described in U.S. Pat. No. 7,198,923), magnetic activated cell sorting (MACS), or with a nanomembrane ultrafiltration concentrator. Various combinations of isolation or concentration methods can be used.

[0206] Highly abundant proteins, such as albumin and immunoglobulin in blood samples, may hinder isolation of vesicles from a biological sample. For example, a vesicle can be isolated from a biological sample using a system that uses multiple antibodies that are specific to the most abundant proteins found in a biological sample, such as blood. Such a system can remove up to several proteins at once, thus unveiling the lower abundance species such as cell-of-origin specific vesicles. This type of system can be used for isolation of vesicles from biological samples such as blood, cerebrospinal fluid or urine. The isolation of vesicles from a biological sample may also be enhanced by high abundant protein removal methods as described in Chromy et al. J Proteome Res 2004; 3:1120-1127. In another embodiment, the isolation of vesicles from a biological sample may also be enhanced by removing serum proteins using glycopeptide capture as described in Zhang et al, Mol Cell Proteomics 2005; 4:144-155. In addition, vesicles from a biological sample such as urine may be isolated by differential centrifugation followed by contact with antibodies directed to cytoplasmic or anti-cytoplasmic epitopes as described in Pisitkun et al., Proc Natl Acad Sci USA, 2004; 101:13368-13373.

[0207] Plasma contains a large variety of proteins including albumin, immunoglobulins, and clotting proteins such as fibrinogen. About 60% of plasma protein comprises the protein albumin (e.g., human serum albumin or HSA), which contributes to osmotic pressure of plasma to assist in the transport of lipids and steroid hormones. Globulins make up about 35% of plasma proteins and are used in the transport of ions, hormones and lipids assisting in immune function. About 4% of plasma protein comprises fibrinogen which is essential in the clotting of blood and can be converted into the insoluble protein fibrin. Other types of blood proteins include: Prealbumin, Alpha 1 antitrypsin, Alpha 1 acid glycoprotein, Alpha 1 fetoprotein, Haptoglobin, Alpha 2 macroglobulin, Ceruloplasmin, Transferrin, complement proteins C3 and C4, Beta 2 microglobulin, Beta lipoprotein, Gamma globulin proteins, C-reactive protein (CRP), Lipoproteins (chylomicrons, VLDL, LDL, HDL), other globulins (types alpha, beta and gamma), Prothrombin and Mannose-binding lectin (MBL). Any of these proteins, including classes of proteins, or derivatives thereof (such as fibrin which is derived from the cleavage of fibrinogen) can be selectively depleted from a biological sample prior to further analysis performed on the sample. Without being bound by theory, removal of such background proteins may facilitate more sensitive, accurate, or precise detection of the biomarkers of interest in the sample.

[0208] Abundant proteins in blood or blood derivatives (e.g., plasma or serum) include without limitation albumin, IgG, transferrin, fibrinogen, IgA, α₂-Macroglobulin, IgM, α₁-Antitrypsin, complement C3, haptoglobulin, apolipoprotein A1, apolipoprotein A3, apolipoprotein B, α₁-Acid Glycoprotein, ceruloplasmin, complement C4, C1q, IgD, prealbumin (transthyretin), and plasminogen. Such proteins can be depleted using commercially available columns and kits. Examples of such columns comprise the Multiple Affinity Removal System from Agilent Technologies (Santa Clara, CA). This system include various cartridges designed to deplete different protein profiles, including the following cartridges with performance characteristics according to the manufacturer: Human 14, which eliminates approximately 94% of total protein (albumin, IgG, antitrypsin, IgA, transferrin, haptoglobin, fibrinogen, alpha2-macroglobulin, alpha1-acid glycoprotein (orosomucoid), IgM, apolipoprotein A1, apolipoprotein AII, complement C3 and transthyretin); Human 7, which eliminates approximately 85-90% of total protein (albumin, IgG, IgA, transferrin, haptoglobin, antitrypsin, and fibrinogen); Human 6, which eliminates approximately 85-90% of total protein (albumin, IgG, IgA, transferrin, haptoglobin, and antitrypsin); Human Albumin/IgG, which eliminates approximately 69% of total protein (albumin and IgG); and Human Albumin, which eliminates approximately 50-55% of total protein (albumin). The ProteoPrep® 20 Plasma Immunodepletion Kit from Sigma-Aldrich is intended to specifically remove the 20 most abundant proteins from human plasma or serum, which is about remove 97-98% of the total protein mass in plasma or serum (Sigma-Aldrich, St. Louis, MO). According to the manufacturer, the ProteoPrep® 20 removes: albumin, IgG, transferrin, fibrinogen, IgA, α₂-Macroglobulin, IgM, α₁-Antitrypsin, complement C3, haptoglobulin, apolipoprotein A1, A3 and B; α₁-Acid Glycoprotein, ceruloplasmin, complement C4, C1q; IgD, prealbumin, and plasminogen. Sigma-Aldrich also manufactures ProteoPrep® columns to remove albumin (HSA) and immunoglobulins (IgG). The ProteomeLab IgY-12 High Capacity Proteome Partitioning kits from Beckman Coulter (Fullerton, CA) are specifically designed to remove twelve highly abundant proteins (Albumin, IgG, Transferrin, Fibrinogen, IgA, α₂-macroglobulin, IgM, al-Antitrypsin, Haptoglobin, Orosomucoid, Apolipoprotein A-I, Apolipoprotein A-II) from the human biological fluids such as serum and plasma. Generally, such systems rely on immunodepletion to remove the target proteins, e.g., using small ligands and/or full antibodies. The PureProteome™ Human Albumin/Immunoglobulin Depletion Kit from Millipore (EMD Millipore Corporation, Billerica, MA, USA) is a magnetic bead based kit that enables high depletion efficiency (typically >99%) of Albumin and all Immunoglobulins (i.e., IgG, IgA, IgM, IgE and IgD) from human serum or plasma samples. The ProteoExtract® Albumin/IgG Removal Kit, also from Millipore, is designed to deplete >80% of albumin and IgG from body fluid samples. Other similar protein depletion products include without limitation the following: Aurum™ Affi-Gels Blue mini kit (Bio-Rad, Hercules, CA, USA); Vivapure® anti-HSA/IgG kit (Sartorius Stedim Biotech, Goettingen, Germany), Qproteome albumin/IgG depletion kit (Qiagen, Hilden, Germany); Seppro® MIXED12-LC20 column (GenWay Biotech, San Diego, CA, USA); Abundant Serum Protein Depletion Kit (Norgen Biotek Corp., Ontario, Canada); GBC Human Albumin/IgG/Transferrin 3 in 1 Depletion Column/Kit (Good Biotech Corp., Taiwan). These systems and similar systems can be used to remove abundant proteins from a biological sample, thereby improving the ability to detect low abundance circulating biomarkers such as proteins and vesicles.

[0209] Thromboplastin is a plasma protein aiding blood coagulation through conversion of prothrombin to thrombin. Thrombin in turn acts as a serine protease that converts soluble fibrinogen into insoluble strands of fibrin, as well as catalyzing many other coagulation-related reactions. Thus, thromboplastin is a protein that can be used to facilitate precipitation of fibrinogen/fibrin (blood clotting factors) out of plasma. In addition to or as an alternative to immunoaffinity protein removal, a blood sample can be treated with thromboplastin to deplete fibrinogen/fibrin. Thromboplastin removal can be performed in addition to or as an alternative to immunoaffinity protein removal as described above using methods known in the art. Precipitation of other proteins and/or other sample particulate can also improve detection of circulating biomarkers such as vesicles in a sample. For example, ammonium sulfate treatment as known in the art can be used to precipitate immunoglobulins and other highly abundant proteins.

[0210] In an embodiment, the invention provides a method of detecting a presence or level of one or more circulating biomarker such as a microvesicle in a biological sample, comprising: (a) providing a biological sample comprising or suspected to comprise the one or more circulating biomarker; (b) selectively depleting one or more abundant protein from the biological sample provided in step (a); (c) performing affinity selection of the one or more circulating biomarker from the sample depleted in step (b), thereby detecting the presence or level of one or more circulating biomarker. The biological sample may comprise a bodily fluid, e.g., peripheral blood, sera, plasma, ascites, urine, cerebrospinal fluid (CSF), sputum, saliva, bone marrow, synovial fluid, aqueous humor, amniotic fluid, cerumen, breast milk, broncheoalveolar lavage fluid, semen, prostatic fluid, cowper's fluid or pre-ejaculatory fluid, female ejaculate, sweat, fecal matter, hair, tears, cyst fluid, pleural and peritoneal fluid, pericardial fluid, lymph, chyme, chyle, bile, interstitial fluid, menses, pus, sebum, vomit, vaginal secretions, mucosal secretion, stool water, pancreatic juice, lavage fluids from sinus cavities, bronchopulmonary aspirates, blastocyl cavity fluid, umbilical cord blood, or a derivative of any thereof. In some embodiments, the biological sample comprises peripheral blood, serum or plasma. Illustrative protocols and results from selectively depleting one or more abundant protein from blood plasma prior to vesicle detection can be found in Example 40 of International Patent Publication No. WO/2014/082083, filed Nov. 26, 2013, which patent publication is incorporated by reference herein in its entirety.

[0211] An abundant protein may comprise a protein in the sample that is present in the sample at a high enough concentration to potentially interfere with downstream processing or analysis. Typically, an abundant protein is not the target of any further analysis of the sample. The abundant protein may constitute at least 10⁻⁵, 10⁻⁴, 10⁻³, 0.01, 0.02, 0.03, 0.04, 0.05, 0.06, 0.07, 0.08, 0.09, 0.1, 0.2, 0.3, 0.4, 0.5, 0.6, 0.7, 0.8, 0.9, 1, 2, 3, 4, 5, 6, 7, 8, 9, 10, 11, 12, 13, 14, 15, 20, 25, 30, 35, 40, 45, 50, 55, 60, 65, 70, 75, 80, 85, 90, 95, 96, 97, 98 or at least 99% of the total protein mass in the sample. In some embodiments, the abundant protein is present at less than 10-5% of the total protein mass in the sample, e.g., in the case of a rare target of interest. As described herein, in the case of blood or a derivative thereof, the one or more abundant protein may comprise one or more of albumin, IgG, transferrin, fibrinogen, fibrin, IgA, α2-Marcroglobulin, IgM, α1-Antitrypsin, complement C3, haptoglobulin, apolipoprotein A1, A3 and B; al-Acid Glycoprotein, ceruloplasmin, complement C4, C1q, IgD, prealbumin (transthyretin), plasminogen, a derivative of any thereof, and a combination thereof. The one or more abundant protein in blood or a blood derivative may also comprise one or more of Albumin, Immunoglobulins, Fibrinogen, Prealbumin, Alpha 1 antitrypsin, Alpha 1 acid glycoprotein, Alpha 1 fetoprotein, Haptoglobin, Alpha 2 macroglobulin, Ceruloplasmin, Transferrin, complement proteins C3 and C4, Beta 2 microglobulin, Beta lipoprotein, Gamma globulin proteins, C-reactive protein (CRP), Lipoproteins (chylomicrons, VLDL, LDL, HDL), other globulins (types alpha, beta and gamma), Prothrombin, Mannose-binding lectin (MBL), a derivative of any thereof, and a combination thereof.

[0212] In some embodiments, selectively depleting the one or more abundant protein comprises contacting the biological sample with thromboplastin to initiate precipitation of fibrin. The one or more abundant protein may also be depleted by immunoaffinity, precipitation, or a combination thereof. For example, the sample can be treated with thromboplastin to precipitate fibrin, and then the sample may be passed through a column to remove HSA, IgG, and other abundant proteins as desired.

[0213] “Selectively depleting” the one or more abundant protein comprises depleting the abundant protein from the sample at a higher percentage than depletion another entity in the sample, such as another protein or microvesicle, including a target of interest for downstream processing or analysis. Selectively depleting the one or more abundant protein may comprise depleting the abundant protein at a 1.1-fold, 1.2-fold, 1.3-fold, 1.4-fold, 1.5-fold, 1.6-fold, 1.7-fold, 1.8-fold, 1.9-fold, 2-fold, 3-fold, 4-fold, 5-fold, 6-fold, 7-fold, 8-fold, 9-fold, 10-fold, 11-fold, 12-fold, 13-fold, 14-fold, 15-fold, 16-fold, 17-fold, 18-fold, 19-fold, 20-fold, 25-fold, 30-fold, 40-fold, 50-fold, 60-fold, 70-fold, 80-fold, 90-fold, 100-fold, 200-fold, 300-fold, 400-fold, 500-fold, 600-fold, 700-fold, 800-fold, 900-fold, 1000-fold, 10⁴-fold, 10⁵-fold, 10⁶-fold, 10⁷-fold, 10⁸-fold, 10⁹-fold, 10¹⁰-fold, 10¹¹-fold, 10¹²-fold, 10¹³-fold, 10¹⁴-fold, 10¹⁵-fold, 10¹⁶-fold, 10¹⁷-fold, 10¹⁸-fold, 10¹⁹-fold, 10²⁰-fold, or higher rate than another entity in the sample, such as another protein or microvesicle, including a target of interest for downstream processing or analysis. In an embodiment, there is little to no observable depletion of the target of interest as compared to the depletion of the abundant protein. In some embodiments, selectively depleting the one or more abundant protein from the biological sample comprises depleting at least 25%, 30%, 35%, 40%, 45%, 50%, 55%, 60%, 65%, 70%, 75%, 80%, 85%, 90%, 91%, 92%, 93%, 94%, 95%, 96%, 97%, 98%, 99% or 100% of the one or more abundant protein.

[0214] Removal of highly abundant proteins and other non-desired entities can further be facilitated with a non-stringent size exclusion step. For example, the sample can be processed using a high molecular weight cutoff size exclusion step to preferentially enrich high molecular weight vesicles apart from lower molecular weight proteins and other entities. In some embodiments, a sample is processed with a column (e.g., a gel filtration column) or filter having a molecular weight cutoff (MWCO) of 500, 600, 700, 800, 900, 1000, 1500, 2000, 2500, 3000, 3500, 4000, 4500, 5000, 5500, 6000, 6500, 7000, 7500, 8000, 8500, 9000, 9500, 10000, or greater than 10000 kiloDaltons (kDa). In an embodiment, a 700 kDa filtration column is used. In such a step, the vesicles will be retained or flow more slowly than the column or filter than the lower molecular weight entities. Such columns and filters are known in the art.

[0215] Isolation or enrichment of a vesicle from a biological sample can also be enhanced by use of sonication (for example, by applying ultrasound), detergents, other membrane-activating agents, or any combination thereof. For example, ultrasonic energy can be applied to a potential tumor site, and without being bound by theory, release of vesicles from a tissue can be increased, allowing an enriched population of vesicles that can be analyzed or assessed from a biological sample using one or more methods disclosed herein.

[0216] With methods of detecting circulating biomarkers as described here, e.g., antibody affinity isolation, the consistency of the results can be optimized as desired using various concentration or isolation procedures. Such steps can include agitation such as shaking or vortexing, different isolation techniques such as polymer based isolation, e.g., with PEG, and concentration to different levels during filtration or other steps. It will be understood by those in the art that such treatments can be applied at various stages of testing the vesicle containing sample. In one embodiment, the sample itself, e.g., a bodily fluid such as plasma or serum, is vortexed. In some embodiments, the sample is vortexed after one or more sample treatment step, e.g., vesicle isolation, has occurred. Agitation can occur at some or all appropriate sample treatment steps as desired. Additives can be introduced at the various steps to improve the process, e.g., to control aggregation or degradation of the biomarkers of interest.

[0217] The results can also be optimized as desirable by treating the sample with various agents. Such agents include additives to control aggregation and/or additives to adjust pH or ionic strength. Additives that control aggregation include blocking agents such as bovine serum albumin (BSA), milk or StabilGuard® (a BSA-free blocking agent; Product code SG02, Surmodics, Eden Prairie, MN), chaotropic agents such as guanidium hydro chloride, and detergents or surfactants. Useful ionic detergents include sodium dodecyl sulfate (SDS, sodium lauryl sulfate (SLS)), sodium laureth sulfate (SLS, sodium lauryl ether sulfate (SLES)), ammonium lauryl sulfate (ALS), cetrimonium bromide, cetrimonium chloride, cetrimonium stearate, and the like. Useful non-ionic (zwitterionic) detergents include polyoxyethylene glycols, polysorbate 20 (also known as Tween 20), other polysorbates (e.g., 40, 60, 65, 80, etc), Triton-X (e.g., X100, X114), 3-[(3-cholamidopropyl)dimethylammonio]-1-propanesulfonate (CHAPS), CHAPSO, deoxycholic acid, sodium deoxycholate, NP-40, glycosides, octyl-thio-glucosides, maltosides, and the like. In some embodiments, Pluronic F-68, a surfactant shown to reduce platelet aggregation, is used to treat samples containing vesicles during isolation and/or detection. F68 can be used from a 0.1% to 10% concentration, e.g., a 1%, 2.5% or 5% concentration. The pH and/or ionic strength of the solution can be adjusted with various acids, bases, buffers or salts, including without limitation sodium chloride (NaCl), phosphate-buffered saline (PBS), tris-buffered saline (TBS), sodium phosphate, potassium chloride, potassium phosphate, sodium citrate and saline-sodium citrate (SSC) buffer. In some embodiments, NaCl is added at a concentration of 0.1% to 10%, e.g., 1%, 2.5% or 5% final concentration. In some embodiments, Tween 20 is added to 0.005 to 2% concentration, e.g., 0.05%, 0.25% or 0.5% final concentration. Blocking agents for use with the invention comprise inert proteins, e.g., milk proteins, non-fat dry milk protein, albumin, BSA, casein, or serum such as newborn calf serum (NBCS), goat serum, rabbit serum or salmon serum. The proteins can be added at a 0.1% to 10% concentration, e.g., 1%, 2%, 3%, 3.5%, 4%, 5%, 6%, 7%, 8%, 9% or 10% concentration. In some embodiments, BSA is added to 0.1% to 10% concentration, e.g., 1%, 2%, 3%, 3.5%, 4%, 5%, 6%, 7%, 8%, 9% or 10% concentration. In an embodiment, the sample is treated according to the methodology presented in U.S. patent application Ser. No. 11/632,946, filed Jul. 13, 2005, which application is incorporated herein by reference in its entirety. Commercially available blockers may be used, such as SuperBlock, StartingBlock, Protein-Free from Pierce (a division of Thermo Fisher Scientific, Rockford, IL). In some embodiments, SSC/detergent (e.g., 20×SSC with 0.5% Tween 20 or 0.1% Triton-X 100) is added to 0.1% to 10% concentration, e.g., at 1.0% or 5.0% concentration.

[0218] The methods of detecting vesicles and other circulating biomarkers can be optimized as desired with various combinations of protocols and treatments as described herein. A detection protocol can be optimized by various combinations of agitation, isolation methods, and additives. In some embodiments, the patient sample is vortexed before and after isolation steps, and the sample is treated with blocking agents including BSA and/or F68. Such treatments may reduce the formation of large aggregates or protein or other biological debris and thus provide a more consistent detection reading.

### Filtration and Ultrafiltration

[0219] A vesicle can be isolated from a biological sample by filtering a biological sample from a subject through a filtration module and collecting from the filtration module a retentate comprising the vesicle, thereby isolating the vesicle from the biological sample. The method can comprise filtering a biological sample from a subject through a filtration module comprising a filter (also referred to herein as a selection membrane); and collecting from the filtration module a retentate comprising the vesicle, thereby isolating the vesicle from the biological sample. For example, in one embodiment, the filter retains molecules greater than about 100 kiloDaltons. In such cases, microvesicles are generally found within the retentate of the filtration process whereas smaller entities such as proteins, protein complexes, nucleic acids, etc, pass through into the filtrate.

[0220] The method can be used when determining a biosignature of one or more microvesicle. The method can also further comprise contacting the retentate from the filtration to a plurality of substrates, wherein each substrate is coupled to one or more capture agents, and each subset of the plurality of substrates comprises a different capture agent or combination of capture agents than another subset of the plurality of substrates.

[0221] Also provided herein is a method of determining a biosignature of a vesicle in a sample comprising: filtering a biological sample from a subject with a disorder through a filtration module, collecting from the filtration module a retentate comprising one or more vesicles, and determining a biosignature of the one or more vesicles. In one embodiment, the filtration module comprises a filter that retains molecules greater than about 100 or 150 kiloDaltons.

[0222] The method disclosed herein can further comprise characterizing a phenotype in a subject by filtering a biological sample from a subject through a filtration module, collecting from the filtration module a retentate comprising one or more vesicles; detecting a biosignature of the one or more vesicles; and characterizing a phenotype in the subject based on the biosignature, wherein characterizing is with at least 70% sensitivity. In some embodiments, characterizing comprises determining an amount of one or more vesicle having the biosignature. Furthermore, the characterizing can be from about 80% to 100% sensitivity.

[0223] Also provided herein is a method for multiplex analysis of a plurality of vesicles. In some embodiments, the method comprises filtering a biological sample from a subject through a filtration module; collecting from the filtration module a retentate comprising the plurality of vesicles, applying the plurality of vesicles to a plurality of capture agents, wherein the plurality of capture agents is coupled to a plurality of substrates, and each subset of the plurality of substrates is differentially labeled from another subset of the plurality of substrates; capturing at least a subset of the plurality of vesicles; and determining a biosignature for at least a subset of the captured vesicles. In one embodiment, each substrate is coupled to one or more capture agents, and each subset of the plurality of substrates comprises a different capture agent or combination of capture agents as compared to another subset of the plurality of substrates. In some embodiments, at least a subset of the plurality of substrates is intrinsically labeled, such as comprising one or more labels. The substrate can be a particle or bead, or any combination thereof. In some embodiments, the filter retains molecules greater than 1, 2, 3, 4, 5, 6, 7, 8, 9, 10, 15, 20, 25, 30, 40, 50, 60, 70, 80, 90, 100, 110, 120, 130, 140, 150, 160, 170, 180, 190, 200, 250, 300, 400, 500, 600, 700, 800, 900, 1000, 1500, 2000, 2500, 3000, 3500, 4000, 4500, 5000, 5500, 6000, 6500, 7000, 7500, 8000, 8500, 9000, 9500, 10000, or greater than 10000 kiloDaltons (kDa). In one embodiment, the filtration module comprises a filter that retains molecules greater than about 100 or 150 kiloDaltons. In one embodiment, the filtration module comprises a filter that retains molecules greater than about 9, 20, 100 or 150 kiloDaltons. In still another embodiment, the filtration module comprises a filter that retains molecules greater than about 7000 kDa.

[0224] In some embodiments, the method for multiplex analysis of a plurality of vesicles comprises filtering a biological sample from a subject through a filtration module, wherein the filtration module comprises a filter that retains molecules greater than about 100 kiloDaltons; collecting from the filtration module a retentate comprising the plurality of vesicles; applying the plurality of vesicles to a plurality of capture agents, wherein the plurality of capture agents is coupled to a microarray; capturing at least a subset of the plurality of vesicles on the microarray; and determining a biosignature for at least a subset of the captured vesicles. In some embodiments, the filter retains molecules greater than 1, 2, 3, 4, 5, 6, 7, 8, 9, 10, 15, 20, 25, 30, 40, 50, 60, 70, 80, 90, 100, 110, 120, 130, 140, 150, 160, 170, 180, 190, 200, 250, 300, 400, 500, 600, 700, 800, 900, 1000, 1500, 2000, 2500, 3000, 3500, 4000, 4500, 5000, 5500, 6000, 6500, 7000, 7500, 8000, 8500, 9000, 9500, 10000, or greater than 10000 kiloDaltons (kDa). In one embodiment, the filtration module comprises a filter that retains molecules greater than about 100 or 150 kiloDaltons. In one embodiment, the filtration module comprises a filter that retains molecules greater than about 9, 20, 100 or 150 kiloDaltons. In still another embodiment, the filtration module comprises a filter that retains molecules greater than about 7000 kDa.

[0225] The biological sample can be clarified prior to isolation by filtration. Clarification comprises selective removal of cellular debris and other undesirable materials. For example, cellular debris and other components that may interfere with detection of the circulating biomarkers can be removed. The clarification can be by low-speed centrifugation, such as at about 5,000×g, 4,000×g, 3,000×g, 2,000×g, 1,000×g, or less. The supernatant, or clarified biological sample, containing the vesicle can then be collected and filtered to isolate the vesicle from the clarified biological sample. In some embodiments, the biological sample is not clarified prior to isolation of a vesicle by filtration.

[0226] In some embodiments, isolation of a vesicle from a sample does not use high-speed centrifugation, such as ultracentrifugation. For example, isolation may not require the use of centrifugal speeds, such as about 100,000×g or more. In some embodiments, isolation of a vesicle from a sample uses speeds of less than 50,000×g, 40,000×g, 30,000×g, 20,000×g, 15,000×g, 12,000×g, or 10,000×g.

[0227] Any number of applicable filter configurations can be used to filter a sample of interest. In some embodiments, the filtration module used to isolate the circulating biomarkers from the biological sample is a fiber-based filtration cartridge. For example, the fiber can be a hollow polymeric fiber, such as a polypropylene hollow fiber. A biological sample can be introduced into the filtration module by pumping the sample fluid, such as a biological fluid as disclosed herein, into the module with a pump device, such as a peristaltic pump. The pump flow rate can vary, such as at about 0.25, 0.5, 1, 1.5, 2, 2.5, 3, 3.5, 4, 4.5, 5, 6, 7, 8, 9, or 10 mL/minute. The flow rate can be adjusted given the configuration, e.g., size and throughput, of the filtration module.

[0228] The filtration module can be a membrane filtration module. For example, the membrane filtration module can comprise a filter disc membrane, such as a hydrophilic polyvinylidene difluoride (PVDF) filter disc membrane housed in a stirred cell apparatus (e.g., comprising a magnetic stirrer). In some embodiments, the sample moves through the filter as a result of a pressure gradient established on either side of the filter membrane.

[0229] The filter can comprise a material having low hydrophobic absorptivity and/or high hydrophilic properties. For example, the filter can have an average pore size for vesicle retention and permeation of most proteins as well as a surface that is hydrophilic, thereby limiting protein adsorption. For example, the filter can comprise a material selected from the group consisting of polypropylene, PVDF, polyethylene, polyfluoroethylene, cellulose, secondary cellulose acetate, polyvinylalcohol, and ethylenevinyl alcohol (EVAL®, Kuraray Co., Okayama, Japan). Additional materials that can be used in a filter include, but are not limited to, polysulfone and polyethersulfone.

[0230] The filtration module can have a filter that retains molecules greater than about 1, 2, 3, 4, 5, 6, 7, 8, 9, 10, 15, 20, 25, 30, 40, 50, 60, 70, 80, 90, 100, 110, 120, 130, 140, 150, 160, 170, 180, 190, 200, 250, 300, 400, 500, 600, 700, 800, or 900 kiloDaltons (kDa), such as a filter that has a MWCO (molecular weight cut off) of about 1, 2, 3, 4, 5, 6, 7, 8, 9, 10, 15, 20, 25, 30, 40, 50, 60, 70, 80, 90, 100, 110, 120, 130, 140, 150, 160, 170, 180, 190, 200, 250, 300, 400, 500, 600, 700, 800, or 900 kDa, respectively. In embodiments, the filtration module has a MWCO of 1000 kDa, 1500 kDa, 2000 kDa, 2500 kDa, 3000 kDa, 3500 kDa, 4000 kDa, 4500 kDa, 5000 kDa, 5500 kDa, 6000 kDa, 6500 kDa, 7000 kDa, 7500 kDa, 8000 kDa, 8500 kDa, 9000 kDa, 9500 kDa, 10000 kDa, or greater than 10000 kDa. Ultrafiltration membranes with a range of MWCO of 9 kDa, 20 kDa and/or 150 kDa can be used. In some embodiments, the filter within the filtration module has an average pore diameter of about 0.01 m to about 0.15 m, and in some embodiments from about 0.05 m to about 0.12 m. In some embodiments, the filter has an average pore diameter of about 0.06 m, 0.07 m, 0.08 m, 0.09 m, 0.1 m, 0.11 m or 0.2 m.

[0231] The filtration module can be a commerically available column, such as a column typically used for concentrating proteins or for isolating proteins (e.g., ultrafiltration). Examples include, but are not limited to, columns from Millpore (Billerica, MA), such as Amicon® centrifugal filters, or from Pierce® (Rockford, IL), such as Pierce Concentrator filter devices. Useful columns from Pierce include disposable ultrafiltration centrifugal devices with a MWCO of 9 kDa, 20 kDa and/or 150 kDa. These concentrators consist of a high-performance regenerated cellulose membrane welded to a conical device. The filters can be as described in U.S. Pat. No. 6,269,957 or 6,357,601, both of which applications are incorporated by reference in their entirety herein.

[0232] The retentate comprising the isolated vesicle can be collected from the filtration module. The retentate can be collected by flushing the retentate from the filter. Selection of a filter composition having hydrophilic surface properties, thereby limiting protein adsorption, can be used, without being bound by theory, for easier collection of the retentate and minimize use of harsh or time-consuming collection techniques.

[0233] The collected retentate can then be used subsequent analysis, such as assessing a biosignature of one or more vesicles in the retentate, as further described herein. The analysis can be directly performed on the collected retentate. Alternatively, the collected retentate can be further concentrated or purified, prior to analysis of one or more vesicles. For example, the retentate can be further concentrated or vesicles further isolated from the retentate using size exclusion chromatography, density gradient centrifugation, differential centrifugation, immunoabsorbent capture, affinity purification, microfluidic separation, or combinations thereof, such as described herein. In some embodiments, the retentate can undergo another step of filtration. Alternatively, prior to isolation of a vesicle using a filter, the vesicle is concentrated or isolated using techniques including without limitation size exclusion chromatography, density gradient centrifugation, differential centrifugation, immunoabsorbent capture, affinity purification, microfluidic separation, or combinations thereof.

[0234] Combinations of filters can be used for concentrating and isolating biomarkers. For example, the biological sample may first be filtered through a filter having a porosity or pore size of between about 0.01 μm to about 10 μm, e.g., 0.01 μm to about 2 μm or about 0.05 μm to about 1.5 μm, and then the sample is filtered. For example, prior to filtering a biological sample through a filtration module with a filter that retains molecules greater than about 1, 2, 3, 4, 5, 6, 7, 8, 9, 10, 15, 20, 25, 30, 40, 50, 60, 70, 80, 90, 100, 110, 120, 130, 140, 150, 160, 170, 180, 190, 200, 250, 300, 400, 500, 600, 700, 800, 900, 1000, 1500, 2000, 2500, 3000, 3500, 4000, 4500, 5000, 5500, 6000, 6500, 7000, 7500, 8000, 8500, 9000, 9500, 10000, or greater than 10000 kiloDaltons (kDa), such as a filter that has a MWCO (molecular weight cut off) of about 1, 2, 3, 4, 5, 6, 7, 8, 9, 10, 15, 20, 25, 30, 40, 50, 60, 70, 80, 90, 100, 110, 120, 130, 140, 150, 160, 170, 180, 190, 200, 250, 300, 400, 500, 600, 700, 800, 900, 1000, 1500, 2000, 2500, 3000, 3500, 4000, 4500, 5000, 5500, 6000, 6500, 7000, 7500, 8000, 8500, 9000, 9500, 10000, or greater than 10000 kDa, respectively, the biological sample may first be filtered through a filter having a porosity or pore size of between about 0.01 μm to about 10 μm, e.g., 0.01 μm to about 2 μm or about 0.05 μm to about 1.5 μm. In some embodiments, the filter has a pore size of about 0.01, 0.02, 0.03, 0.04, 0.05, 0.06, 0.07, 0.08, 0.09, 0.1, 0.2, 0.3, 0.4, 0.5, 0.6, 0.7, 0.8, 0.9, 1.0, 1.1, 1.2, 1.3, 1.4, 1.5, 1.6, 1.7, 1.8, 1.9 or 2.0, 3.0, 4.0, 5.0, 6.0, 7.0, 8.0, 9.0 or 10.0 μm. The filter may be a syringe filter. Thus, in one embodiment, the method comprises filtering the biological sample through a filter, such as a syringe filter, wherein the syringe filter has a porosity of greater than about 1 μm, prior to filtering the sample through a filtration module comprising a filter that retains molecules greater than about 100 or 150 kiloDaltons. In an embodiment, the filter is 1.2 μM filter and the filtration is followed by passage of the sample through a 7 ml or 20 ml concentrator column with a 150 kDa cutoff. Multiple concentrator columns may be used, e.g., in series. For example, a 7000 MWCO filtration unit can be used before a 150 MWCO unit.

[0235] The filtration module can be a component of a microfluidic device. Microfluidic devices, which may also be referred to as “lab-on-a-chip” systems, biomedical micro-electro-mechanical systems (bioMEMs), or multicomponent integrated systems, can be used for isolating, and analyzing, vesicles. Such systems miniaturize and compartmentalize processes that allow for binding of vesicles, detection of biomarkers, and other processes, such as further described herein.

[0236] The filtration module and assessment can be as described in Grant, R., et al., A filtration-based protocol to isolate human Plasma Membrane-derived Vesicles and exosomes from blood plasma, J Immunol Methods (2011) 371:143-51 (Epub 2011 Jun. 30), which reference is incorporated herein by reference in its entirety.

[0237] A microfluidic device can also be used for isolation of a vesicle by comprising a filtration module. For example, a microfluidic device can use one more channels for isolating a vesicle from a biological sample based on size from a biological sample. A biological sample can be introduced into one or more microfluidic channels, which selectively allows the passage of vesicles. The microfluidic device can further comprise binding agents, or more than one filtration module to select vesicles based on a property of the vesicles, for example, size, shape, deformability, biomarker profile, or biosignature.

[0238] The retentate from a filtration step can be further processed before assessment of microvesicles or other biomarkers therein. In an embodiment, the retentate is diluted prior to biomarker assessment, e.g., with an appropriate diluent such as a biologically compatible buffer. In some cases, the retentate is serially diluted. In an aspect, the invention provides a method for detecting a microvesicle population from a biological sample comprising: a) concentrating the biological sample using a selection membrane having a pore size of from 0.01 μm to about 10 μm, or a molecular weight cut off (MWCO) from about 1 kDa to 10000 kDa; b) diluting a retentate from the concentration step into one or more aliquots; and c) contacting each of the one or more aliquots of retentate with one or more binding agent specific to a molecule of at least one microvesicle in the microvesicle population. In a related aspect, the invention provides a method for detecting a microvesicle population from a biological sample comprising: a) concentrating the biological sample using a selection membrane having a pore size of from 0.01 μm to about 10 μm, or a molecular weight cut off (MWCO) from about 1 kDa to 10000 kDa; and b) contacting one or more aliquots of the retentate from the concentrating step with one or more binding agent specific to a molecule of at least one microvesicle in the microvesicle population.

[0239] The selection membrane can be sized to retain the desired biomarkers in the retentate or to allow the desired biomarkers to pass through the filter into the filtrate. The filter membrane can be chosen to have a certain pore size or MWCO value. The selection membrane can have a pore size of about 0.01, 0.02, 0.03, 0.04, 0.05, 0.06, 0.07, 0.08, 0.09, 0.1, 0.2, 0.3, 0.4, 0.5, 0.6, 0.7, 0.8, 0.9, 1.0, 1.1, 1.2, 1.3, 1.4, 1.5, 1.6, 1.7, 1.8, 1.9 or 2.0, 3.0, 4.0, 5.0, 6.0, 7.0, 8.0, 9.0 or 10.0 μm. The selection membrane can also have a MWCO of about 1, 2, 3, 4, 5, 6, 7, 8, 9, 10, 15, 20, 25, 30, 40, 50, 60, 70, 80, 90, 100, 110, 120, 130, 140, 150, 160, 170, 180, 190, 200, 250, 300, 400, 500, 600, 700, 800, 900, 1000, 2000, 3000, 4000, 5000, 6000, 7000, 8000, 9000 or 10000 kDa.

[0240] The retentate can be separated and/or diluted into any number of desired aliquots. For example, multiple aliquots without any dilution or the same dilution can be used to determine reproducibility. In another example, multiple aliquots at different dilutions can be used to construct a concentration curve. In an embodiment, the retentate is separated and/or diluted into at least 1, 2, 3, 4, 5, 6, 7, 8, 9, 10, 11, 12, 13, 14, 15, 16, 17, 18, 19, 20, 25, 30, 35, 40, 45, 50, 55, 60, 65, 70, 75, 80, 85, 90, 95, 100, 150, 200, 250, 300, 350 or 400 aliquots. The aliquots can be at a same dilution or at different dilutions.

[0241] A dilution factor is the ratio of the final volume of a mixture (the mixture of the diluents and aliquot) divided by the initial volume of the aliquot. The retentate can be diluted into one or more aliquots at a dilution factor of about 0, 1, 2, 3, 4, 5, 6, 7, 8, 9, 10, 15, 20, 25, 30, 40, 50, 60, 70, 80, 90, 100, 110, 120, 130, 140, 150, 160, 170, 180, 190, 200, 250, 300, 400, 500, 600, 700, 800, 900, 1000, 1500, 2000, 2500, 3000, 3500, 4000, 4500, 5000, 5500, 6000, 6500, 7000, 7500, 8000, 8500, 9000, 9500, 10000, 20000, 30000, 40000, 50000, 60000, 70000, 80000, 90000 and/or 100000. For example, the retentate can be diluted into one or more aliquot at a dilution factor of about 500.

[0242] To estimate a concentration or form a curve, the retentate can be diluted into multiple aliquots. In an embodiment of the method, the retentate is diluted into one or more aliquots at a dilution factor of about 100, 250, 500, 1000, 10000 and 100000. As desired, the method can further comprise detecting an amount of microvesicles in each aliquot of retentate, e.g., that formed a complex with the one or more binding agent. The curve can be used to determine a linear range of the amount of microvesicles in each aliquot detected versus dilution factor. A concentration of the detected microvesicles for the biological sample can be determined using the amount of microvesicles determined in one or more aliquot within the linear range. The concentration can be compared to a reference concentration, e.g., in order to characterize a phenotype as described herein.

[0243] The invention also provides a related method comprising filtering a biological sample from a subject through a filtration module and collecting a filtrate comprising the vesicle, thereby isolating the vesicle from the biological sample. In such cases cells and other large entities can be retained in the retentate while microvesicles pass through into the filtrate. It will be appreciated that strategies to retain and filter microvesicles can be used in concert. For example, a sample can be filtered with a selection membrane that allows microvesicles to pass through, thereby isolating the microvesicles from large particles (cells, complexes, etc). The filtrate comprising the microvesicle can then be filtered using a selection membrane that retains microvesicles, thereby isolating the microvesicles from smaller particles (proteins, nucleic acids, etc). The isolated microvesicles can be further assessed according to the methods of the invention, e.g., to characterize a phenotype.

### Precipitation

[0244] Vesicles can be isolated using a polymeric precipitation method. The method can be in combination with or in place of the other isolation methods described herein. In one embodiment, the sample containing the vesicles is contacted with a formulation of polyethylene glycol (PEG). The polymeric formulation is incubated with the vesicle containing sample then precipitated by centrifugation. The PEG can bind to the vesicles and can be treated to specifically capture vesicles by addition of a capture moiety, e.g., a pegylated-binding protein such as an antibody. One of skill will appreciate that other polymers in addition to PEG can be used, e.g., PEG derivatives including methoxypolyethylene glycols, poly (ethylene oxide), and various polymers of formula HO—CH₂—(CH₂—O—CH₂-)n-CH₂—OH having different molecular weights. The efficiency of isolation may depend on various factors including the length of the polymer chains and concentration of polymer used. In preferred embodiments, PEG4000 or PEG 8000 may be used at a concentration of 1%, 2%, 3%, 4%, 5%, 6%, 7%, 8%, 9%, or 10%, e.g., 4% or 8%.

[0245] In some embodiments of the invention, the vesicles are concentrated from a sample using the polymer precipitation method and the isolated vesicles are further separated using another approach. The second step can be used to identify a subpopulation of vesicles, e.g., that display certain biomarkers. The second separation step can comprise size exclusion, a binding agent, an antibody capture step, microbeads, as described herein.

[0246] In an embodiment, vesicles are isolated according to the ExoQuick™ and ExoQuick-TC™ kits from System Biosciences, Mountain View, CA USA. These kits use a polymer-based precipitation method to pellet vesicles. Similarly, the vesicles can be isolated using the Total Exosome Isolation (from Serum) or Total Exosome Isolation (from Cell Culture Media) kits from Invitrogen/Life Technologies (Carlsbad, CA USA). The Total Exosome Isolation reagent forces less-soluble components such as vesicles out of solution, allowing them to be collected by a short, low-speed centrifugation. The reagent is added to the biological sample, and the solution is incubated overnight at 2° C. to 8° C. The precipitated vesicles are recovered by standard centrifugation.

### Binding Agents

[0247] Binding agents (also referred to as binding reagents) include agents that are capable of binding a target biomarker. A binding agent can be specific for the target biomarker, meaning the agent is capable of binding a target biomarker. The target can be any useful biomarker disclosed herein, such as a biomarker on the vesicle surface. In some embodiments, the target is a single molecule, such as a single protein, so that the binding agent is specific to the single protein. In other embodiments, the target can be a group of molecules, such as a family or proteins having a similar epitope or moiety, so that the binding agent is specific to the family or group of proteins. The group of molecules can also be a class of molecules, such as protein, DNA or RNA. The binding agent can be a capture agent used to capture a vesicle by binding a component or biomarker of a vesicle. In some embodiments, a capture agent comprises an antibody or fragment thereof, or an aptamer, that binds to an antigen on a vesicle. The capture agent can be optionally coupled to a substrate and used to isolate a vesicle, as further described herein.

[0248] A binding agent is an agent that binds to a circulating biomarker, such as a vesicle or a component of a vesicle. The binding agent can be used as a capture agent and/or a detection agent. A capture agent can bind and capture a circulating biomarker, such as by binding a component or biomarker of a vesicle. For example, the capture agent can be a capture antibody or capture antigen that binds to an antigen on a vesicle. A detection agent can bind to a circulating biomarker thereby facilitating detection of the biomarker. For example, a capture agent comprising an antibody or aptamer that is sequestered to a substrate can be used to capture a vesicle in a sample, and a detection agent comprising an antibody or aptamer that carries a label can be used to detect the captured vesicle via detection of the detection agent's label. In some embodiments, a vesicle is assessed using capture and detection agents that recognize the same vesicle biomarkers. For example, a vesicle population can be captured using a tetraspanin such as by using an anti-CD9 antibody bound to a substrate, and the captured vesicles can be detected using a fluorescently labeled anti-CD9 antibody to label the captured vesicles. In other embodiments, a vesicle is assessed using capture and detection agents that recognize different vesicle biomarkers. For example, a vesicle population can be captured using a cell-specific marker such as by using an anti-PCSA antibody bound to a substrate, and the captured vesicles can be detected using a fluorescently labeled anti-CD9 antibody to label the captured vesicles. Similarly, the vesicle population can be captured using a general vesicle marker such as by using an anti-CD9 antibody bound to a substrate, and the captured vesicles can be detected using a fluorescently labeled antibody to a cell-specific or disease specific marker to label the captured vesicles.

[0249] The biomarkers recognized by the binding agent are sometimes referred to herein as an antigen. Unless otherwise specified, antigen as used herein is meant to encompass any entity that is capable of being bound by a binding agent, regardless of the type of binding agent or the immunogenicity of the biomarker. The antigen further encompasses a functional fragment thereof. For example, an antigen can encompass a protein biomarker capable of being bound by a binding agent, including a fragment of the protein that is capable of being bound by a binding agent.

[0250] In one embodiment, a vesicle is captured using a capture agent that binds to a biomarker on a vesicle. The capture agent can be coupled to a substrate and used to isolate a vesicle, as further described herein. In one embodiment, a capture agent is used for affinity capture or isolation of a vesicle present in a substance or sample.

[0251] A binding agent can be used after a vesicle is concentrated or isolated from a biological sample. For example, a vesicle can first be isolated from a biological sample before a vesicle with a specific biosignature is isolated or detected. The vesicle with a specific biosignature can be isolated or detected using a binding agent for the biomarker. A vesicle with the specific biomarker can be isolated or detected from a heterogeneous population of vesicles. Alternatively, a binding agent may be used on a biological sample comprising vesicles without a prior isolation or concentration step. For example, a binding agent is used to isolate or detect a vesicle with a specific biosignature directly from a biological sample.

[0252] A binding agent can be a nucleic acid, protein, or other molecule that can bind to a component of a vesicle. The binding agent can comprise DNA, RNA, monoclonal antibodies, polyclonal antibodies, Fabs, Fab′, single chain antibodies, synthetic antibodies, aptamers (DNA/RNA), peptoids, zDNA, peptide nucleic acids (PNAs), locked nucleic acids (LNAs), lectins, synthetic or naturally occurring chemical compounds (including but not limited to drugs, labeling reagents), dendrimers, or a combination thereof. For example, the binding agent can be a capture antibody. In embodiments of the invention, the binding agent comprises a membrane protein labeling agent. See, e.g., the membrane protein labeling agents disclosed in Alroy et al., US. Patent Publication US 2005/0158708. In an embodiment, vesicles are isolated or captured as described herein, and one or more membrane protein labeling agent is used to detect the vesicles.

[0253] In some instances, a single binding agent can be employed to isolate or detect a vesicle. In other instances, a combination of different binding agents may be employed to isolate or detect a vesicle. For example, at least 2, 3, 4, 5, 6, 7, 8, 9, 10, 11, 12, 13, 14, 15, 16, 17, 18, 19, 20, 25, 50, 75 or 100 different binding agents may be used to isolate or detect a vesicle from a biological sample. Furthermore, the one or more different binding agents for a vesicle can form a biosignature of a vesicle, as further described below.

[0254] Different binding agents can also be used for multiplexing. For example, isolation or detection of more than one population of vesicles can be performed by isolating or detecting each vesicle population with a different binding agent. Different binding agents can be bound to different particles, wherein the different particles are labeled. In another embodiment, an array comprising different binding agents can be used for multiplex analysis, wherein the different binding agents are differentially labeled or can be ascertained based on the location of the binding agent on the array. Multiplexing can be accomplished up to the resolution capability of the labels or detection method, such as described below. The binding agents can be used to detect the vesicles, such as for detecting cell-of-origin specific vesicles. A binding agent or multiple binding agents can themselves form a binding agent profile that provides a biosignature for a vesicle. One or more binding agents can be selected from FIG. 2 of International Patent Publication No. WO/2011/127219, entitled “Circulating Biomarkers for Disease” and filed Apr. 6, 2011, which application is incorporated by reference in its entirety herein. For example, if a vesicle population is detected or isolated using two, three, four or more binding agents in a differential detection or isolation of a vesicle from a heterogeneous population of vesicles, the particular binding agent profile for the vesicle population provides a biosignature for the particular vesicle population. The vesicle can be detected using any number of binding agents in a multiplex fashion. Thus, the binding agent can also be used to form a biosignature for a vesicle. The biosignature can be used to characterize a phenotype.

[0255] The binding agent can be a lectin. Lectins are proteins that bind selectively to polysaccharides and glycoproteins and are widely distributed in plants and animals. For example, lectins such as those derived from Galanthus nivalis in the form of Galanthus nivalis agglutinin (“GNA”), Narcissus pseudonarcissus in the form of Narcissus pseudonarcissus agglutinin (“NPA”) and the blue green algae Nostoc ellipsosporum called “cyanovirin” (Boyd et al. Antimicrob Agents Chemother 41(7): 1521 1530, 1997; Hammar et al. Ann NY Acad Sci 724: 166 169, 1994; Kaku et al. Arch Biochem Biophys 279(2): 298 304, 1990) can be used to isolate a vesicle. These lectins can bind to glycoproteins having a high mannose content (Chervenak et al. Biochemistry 34(16): 5685 5695, 1995). High mannose glycoprotein refers to glycoproteins having mannose-mannose linkages in the form of α-1→3 or α-1→6 mannose-mannose linkages.

[0256] The binding agent can be an agent that binds one or more lectins. Lectin capture can be applied to the isolation of the biomarker cathepsin D since it is a glycosylated protein capable of binding the lectins Galanthus nivalis agglutinin (GNA) and concanavalin A (ConA).

[0257] Methods and devices for using lectins to capture vesicles are described in International Patent Publications WO/2011/066589, entitled “METHODS AND SYSTEMS FOR ISOLATING, STORING, AND ANALYZING VESICLES” and filed Nov. 30, 2010; WO/2010/065765, entitled “AFFINITY CAPTURE OF CIRCULATING BIOMARKERS” and filed Dec. 3, 2009; WO/2010/141862, entitled “METHODS AND MATERIALS FOR ISOLATING EXOSOMES” and filed Jun. 4, 2010; and WO/2007/103572, entitled “EXTRACORPOREAL REMOVAL OF MICROVESICULAR PARTICLES” and filed Mar. 9, 2007, each of which applications is incorporated by reference herein in its entirety.

[0258] The binding agent can be an antibody. For example, a vesicle may be isolated using one or more antibodies specific for one or more antigens present on the vesicle. For example, a vesicle can have CD63 on its surface, and an antibody, or capture antibody, for CD63 can be used to isolate the vesicle. Alternatively, a vesicle derived from a tumor cell can express EpCam, the vesicle can be isolated using an antibody for EpCam and CD63. Other antibodies for isolating vesicles can include an antibody, or capture antibody, to CD9, PSCA, TNFR, CD63, B7H3, MFG-E8, EpCam, Rab, CD81, STEAP, PCSA, PSMA, or 5T4. Other antibodies for isolating vesicles can include an antibody, or capture antibody, to DR3, STEAP, epha2, TMEM211, MFG-E8, Tissue Factor (TF), unc93A, A33, CD24, NGAL, EpCam, MUC17, TROP2, or TETS.

[0259] In some embodiments, the capture agent is an antibody to CD9, CD63, CD81, PSMA, PCSA, B7H3, EpCam, PSCA, ICAM, STEAP, or EGFR. The capture agent can also be used to identify a biomarker of a vesicle. For example, a capture agent such as an antibody to CD9 would identify CD9 as a biomarker of the vesicle. In some embodiments, a plurality of capture agents can be used, such as in multiplex analysis. The plurality of captures agents can comprise binding agents to one or more of: CD9, CD63, CD81, PSMA, PCSA, B7H3, EpCam, PSCA, ICAM, STEAP, and EGFR. In some embodiments, the plurality of capture agents comprise binding agents to CD9, CD63, CD81, PSMA, PCSA, B7H3, MFG-E8, and/or EpCam. In yet other embodiments, the plurality of capture agents comprises binding agents to CD9, CD63, CD81, PSMA, PCSA, B7H3, EpCam, PSCA, ICAM, STEAP, and/or EGFR. The plurality of capture agents comprises binding agents to TMEM211, MFG-E8, Tissue Factor (TF), and/or CD24.

[0260] The antibodies referenced herein can be immunoglobulin molecules or immunologically active portions of immunoglobulin molecules, i.e., molecules that contain an antigen binding site that specifically binds an antigen and synthetic antibodies. The immunoglobulin molecules can be of any class (e.g., IgG, IgE, IgM, IgD or IgA) or subclass of immunoglobulin molecule. Antibodies include, but are not limited to, polyclonal, monoclonal, bispecific, synthetic, humanized and chimeric antibodies, single chain antibodies, Fab fragments and F(ab′)₂ fragments, Fv or Fv′ portions, fragments produced by a Fab expression library, anti-idiotypic (anti-Id) antibodies, or epitope-binding fragments of any of the above. An antibody, or generally any molecule, “binds specifically” to an antigen (or other molecule) if the antibody binds preferentially to the antigen, and, e.g., has less than about 30%, 20%, 10%, 5% or 1% cross-reactivity with another molecule.

[0261] The binding agent can also be a polypeptide or peptide. Polypeptide is used in its broadest sense and may include a sequence of subunit amino acids, amino acid analogs, or peptidomimetics. The subunits may be linked by peptide bonds. The polypeptides may be naturally occurring, processed forms of naturally occurring polypeptides (such as by enzymatic digestion), chemically synthesized or recombinantly expressed. The polypeptides for use in the methods of the present invention may be chemically synthesized using standard techniques. The polypeptides may comprise D-amino acids (which are resistant to L-amino acid-specific proteases), a combination of D- and L-amino acids, β amino acids, or various other designer or non-naturally occurring amino acids (e.g., β-methyl amino acids, Cα-methyl amino acids, and Nα-methyl amino acids, etc.) to convey special properties. Synthetic amino acids may include ornithine for lysine, and norleucine for leucine or isoleucine. In addition, the polypeptides can have peptidomimetic bonds, such as ester bonds, to prepare polypeptides with novel properties. For example, a polypeptide may be generated that incorporates a reduced peptide bond, i.e., R₁—CH₂—NH—R₂, where R₁ and R₂ are amino acid residues or sequences. A reduced peptide bond may be introduced as a dipeptide subunit. Such a polypeptide would be resistant to protease activity, and would possess an extended half-live in vivo. Polypeptides can also include peptoids (N-substituted glycines), in which the side chains are appended to nitrogen atoms along the molecule's backbone, rather than to the α-carbons, as in amino acids. Polypeptides and peptides are intended to be used interchangeably throughout this application, i.e. where the term peptide is used, it may also include polypeptides and where the term polypeptides is used, it may also include peptides. The term “protein” is also intended to be used interchangeably throughout this application with the terms “polypeptides” and “peptides” unless otherwise specified.

[0262] A vesicle may be isolated, captured or detected using a binding agent. The binding agent can be an agent that binds a vesicle “housekeeping protein,” or general vesicle biomarker. The biomarker can be CD63, CD9, CD81, CD82, CD37, CD53, Rab-5b, Annexin V, MFG-E8 or other commonly observed vesicle markers include those listed in Table 3. Furthermore, any of the markers disclosed herein or in Table 3 can be selected in identifying a candidate biosignature for a disease or condition, where the one or more selected biomarkers have a direct or indirect role or function in mechanisms involved in the disease or condition.

[0263] The binding agent can also be an agent that binds to a vesicle derived from a specific cell type, such as a tumor cell (e.g. binding agent for Tissue factor, EpCam, B7H3, RAGE or CD24) or a specific cell-of-origin. The binding agent used to isolate or detect a vesicle can be a binding agent for an antigen selected from FIG. 1 of International Patent Publication No. WO/2011/127219, entitled “Circulating Biomarkers for Disease” and filed Apr. 6, 2011, which application is incorporated by reference in its entirety herein. The binding agent for a vesicle can also be selected from those listed in FIG. 2 of International Patent Publication No. WO/2011/127219. The binding agent can be for an antigen such as a tetraspanin, MFG-E8, Annexin V, 5T4, B7H3, caveolin, CD63, CD9, E-Cadherin, Tissue factor, MFG-E8, TMEM211, CD24, PSCA, PCSA, PSMA, Rab-5B, STEAP, TNFR1, CD81, EpCam, CD59, CD81, ICAM, EGFR, or CD66. A binding agent for a platelet can be a glycoprotein such as GpIa-IIa, GpIIb-IIIa, GpIIIb, GpIb, or GpIX. A binding agent can be for an antigen comprising one or more of CD9, Erb2, Erb4, CD81, Erb3, MUC16, CD63, DLL4, HLA-Drpe, B7H3, IFNAR, 5T4, PCSA, MICB, PSMA, MFG-E8, Muc1, PSA, Muc2, Unc93a, VEGFR2, EpCAM, VEGF A, TMPRSS2, RAGE, PSCA, CD40, Muc17, IL-17-RA, and CD80. For example, the binding agent can be one or more of CD9, CD63, CD81, B7H3, PCSA, MFG-E8, MUC2, EpCam, RAGE and Muc17. One or more binding agents, such as one or more binding agents for two or more of the antigens, can be used for isolating or detecting a vesicle. The binding agent used can be selected based on the desire of isolating or detecting a vesicle derived from a particular cell type or cell-of-origin specific vesicle. The binding agent can be to one or more vesicle marker in Table 4.

[0264] A binding agent can also be linked directly or indirectly to a solid surface or substrate. A solid surface or substrate can be any physically separable solid to which a binding agent can be directly or indirectly attached including, but not limited to, surfaces provided by microarrays and wells, particles such as beads, columns, optical fibers, wipes, glass and modified or functionalized glass, quartz, mica, diazotized membranes (paper or nylon), polyformaldehyde, cellulose, cellulose acetate, paper, ceramics, metals, metalloids, semiconductive materials, quantum dots, coated beads or particles, other chromatographic materials, magnetic particles; plastics (including acrylics, polystyrene, copolymers of styrene or other materials, polypropylene, polyethylene, polybutylene, polyurethanes, polytetrafluoroethylene (PTFE, Teflon®), etc.), polysaccharides, nylon or nitrocellulose, resins, silica or silica-based materials including silicon and modified silicon, carbon, metals, inorganic glasses, plastics, ceramics, conducting polymers (including polymers such as polypyrole and polyindole); micro or nanostructured surfaces such as nucleic acid tiling arrays, nanotube, nanowire, or nanoparticulate decorated surfaces; or porous surfaces or gels such as methacrylates, acrylamides, sugar polymers, cellulose, silicates, or other fibrous or stranded polymers. In addition, as is known the art, the substrate may be coated using passive or chemically-derivatized coatings with any number of materials, including polymers, such as dextrans, acrylamides, gelatins or agarose. Such coatings can facilitate the use of the array with a biological sample.

[0265] For example, an antibody used to isolate a vesicle can be bound to a solid substrate such as a well, such as commercially available plates (e.g. from Nunc, Milan Italy). Each well can be coated with the antibody. In some embodiments, the antibody used to isolate a vesicle is bound to a solid substrate such as an array. The array can have a predetermined spatial arrangement of molecule interactions, binding islands, biomolecules, zones, domains or spatial arrangements of binding islands or binding agents deposited within discrete boundaries. Further, the term array may be used herein to refer to multiple arrays arranged on a surface, such as would be the case where a surface bore multiple copies of an array. Such surfaces bearing multiple arrays may also be referred to as multiple arrays or repeating arrays.

[0266] Arrays typically contain addressable moieties that can detect the presence of an entity, e.g., a vesicle in the sample via a binding event. An array may be referred to as a microarray. Arrays or microarrays include without limitation DNA microarrays, such as cDNA microarrays, oligonucleotide microarrays and SNP microarrays, microRNA arrays, protein microarrays, antibody microarrays, tissue microarrays, cellular microarrays (also called transfection microarrays), chemical compound microarrays, and carbohydrate arrays (glycoarrays). DNA arrays typically comprise addressable nucleotide sequences that can bind to sequences present in a sample. MicroRNA arrays, e.g., the MMChips array from the University of Louisville or commercial systems from Agilent, can be used to detect microRNAs. Protein microarrays can be used to identify protein-protein interactions, including without limitation identifying substrates of protein kinases, transcription factor protein-activation, or to identify the targets of biologically active small molecules. Protein arrays may comprise an array of different protein molecules, commonly antibodies, or nucleotide sequences that bind to proteins of interest. In a non-limiting example, a protein array can be used to detect vesicles having certain proteins on their surface. Antibody arrays comprise antibodies spotted onto the protein chip that are used as capture molecules to detect proteins or other biological materials from a sample, e.g., from cell or tissue lysate solutions. For example, antibody arrays can be used to detect vesicle-associated biomarkers from bodily fluids, e.g., serum or urine. Tissue microarrays comprise separate tissue cores assembled in array fashion to allow multiplex histological analysis. Cellular microarrays, also called transfection microarrays, comprise various capture agents, such as antibodies, proteins, or lipids, which can interact with cells to facilitate their capture on addressable locations. Cellular arrays can also be used to capture vesicles due to the similarity between a vesicle and cellular membrane. Chemical compound microarrays comprise arrays of chemical compounds and can be used to detect protein or other biological materials that bind the compounds. Carbohydrate arrays (glycoarrays) comprise arrays of carbohydrates and can detect, e.g., protein that bind sugar moieties. One of skill will appreciate that similar technologies or improvements can be used according to the methods of the invention.

[0267] A binding agent can also be bound to particles such as beads or microspheres. For example, an antibody specific for a component of a vesicle can be bound to a particle, and the antibody-bound particle is used to isolate a vesicle from a biological sample. In some embodiments, the microspheres may be magnetic or fluorescently labeled. In addition, a binding agent for isolating vesicles can be a solid substrate itself. For example, latex beads, such as aldehyde/sulfate beads (Interfacial Dynamics, Portland, OR) can be used.

[0268] A binding agent bound to a magnetic bead can also be used to isolate a vesicle. For example, a biological sample such as serum from a patient can be collected for colon cancer screening. The sample can be incubated with anti-CCSA-3 (Colon Cancer-Specific Antigen) coupled to magnetic microbeads. A low-density microcolumn can be placed in the magnetic field of a MACS Separator and the column is then washed with a buffer solution such as Tris-buffered saline. The magnetic immune complexes can then be applied to the column and unbound, non-specific material can be discarded. The CCSA-3 selected vesicle can be recovered by removing the column from the separator and placing it on a collection tube. A buffer can be added to the column and the magnetically labeled vesicle can be released by applying the plunger supplied with the column. The isolated vesicle can be diluted in IgG elution buffer and the complex can then be centrifuged to separate the microbeads from the vesicle. The pelleted isolated cell-of-origin specific vesicle can be resuspended in buffer such as phosphate-buffered saline and quantitated. Alternatively, due to the strong adhesion force between the antibody captured cell-of-origin specific vesicle and the magnetic microbeads, a proteolytic enzyme such as trypsin can be used for the release of captured vesicles without the need for centrifugation. The proteolytic enzyme can be incubated with the antibody captured cell-of-origin specific vesicles for at least a time sufficient to release the vesicles.

[0269] A binding agent, such as an antibody, for isolating vesicles is preferably contacted with the biological sample comprising the vesicles of interest for at least a time sufficient for the binding agent to bind to a component of the vesicle. For example, an antibody may be contacted with a biological sample for various intervals ranging from seconds days, including but not limited to, about 10 minutes, 30 minutes, 1 hour, 3 hours, 5 hours, 7 hours, 10 hours, 15 hours, 1 day, 3 days, 7 days or 10 days.

[0270] A binding agent, such as an antibody specific to an antigen listed in FIG. 1 of International Patent Publication No. WO/2011/127219, entitled “Circulating Biomarkers for Disease” and filed Apr. 6, 2011, which application is incorporated by reference in its entirety herein, or a binding agent listed in FIG. 2 of International Patent Publication No. WO/2011/127219, can be labeled to facilitate detection. Appropriate labels include without limitation a magnetic label, a fluorescent moiety, an enzyme, a chemiluminescent probe, a metal particle, a non-metal colloidal particle, a polymeric dye particle, a pigment molecule, a pigment particle, an electrochemically active species, semiconductor nanocrystal or other nanoparticles including quantum dots or gold particles, fluorophores, quantum dots, or radioactive labels. Various protein, radioactive, fluorescent, enzymatic, and other labels are described further above.

[0271] A binding agent can be directly or indirectly labeled, e.g., the label is attached to the antibody through biotin-streptavidin. Alternatively, an antibody is not labeled, but is later contacted with a second antibody that is labeled after the first antibody is bound to an antigen of interest.

[0272] Depending on the method of isolation or detection used, the binding agent may be linked to a solid surface or substrate, such as arrays, particles, wells and other substrates described above. Methods for direct chemical coupling of antibodies, to the cell surface are known in the art, and may include, for example, coupling using glutaraldehyde or maleimide activated antibodies. Methods for chemical coupling using multiple step procedures include biotinylation, coupling of trinitrophenol (TNP) or digoxigenin using for example succinimide esters of these compounds. Biotinylation can be accomplished by, for example, the use of D-biotinyl-N-hydroxysuccinimide. Succinimide groups react effectively with amino groups at pH values above 7, and preferentially between about pH 8.0 and about pH 8.5. Biotinylation can be accomplished by, for example, treating the cells with dithiothreitol followed by the addition of biotin maleimide.

### Particle-Based Assays

[0273] As an alternative to planar arrays, assays using particles or microspheres, such as bead based assays, are capable of use with a binding agent. For example, antibodies or aptamers are easily conjugated with commercially available beads. See, e.g., Fan et al., Illumina universal bead arrays. Methods Enzymol. 2006 410:57-73; Srinivas et al. Anal. Chem. 2011 Oct. 21, Aptamer functionalized Microgel Particles for Protein Detection; See also, review article on aptamers as therapeutic and diagnostic agents, Brody and Gold, Rev. Mol. Biotech. 2000, 74:5-13.

[0274] Multiparametric assays or other high throughput detection assays using bead coatings with cognate ligands and reporter molecules with specific activities consistent with high sensitivity automation can be used. In a bead based assay system, a binding agent for a biomarker or vesicle, such as a capture agent (e.g. capture antibody), can be immobilized on an addressable microsphere. Each binding agent for each individual binding assay can be coupled to a distinct type of microsphere (i.e., microbead) and the assay reaction takes place on the surface of the microsphere, such as depicted in FIG. 2B. A binding agent for a vesicle can be a capture antibody or aptamer coupled to a bead. Dyed microspheres with discrete fluorescence intensities are loaded separately with their appropriate binding agent or capture probes. The different bead sets carrying different binding agents can be pooled as desired to generate custom bead arrays. Bead arrays are then incubated with the sample in a single reaction vessel to perform the assay.

[0275] Various particle/bead substrates and systems useful for the methods of the invention are described further above.

### Flow Cytometry

[0276] In various embodiments of the invention, flow cytometry, which is described in further detail above, is used to assess a microvesicle population in a biological sample. If desired, the microvesicle population can be sorted from other particles (e.g., cell debris, protein aggregates, etc) in a sample by labeling the vesicles using one or more general vesicle marker. The general vesicle marker can be a marker in Table 3. Commonly used vesicle markers include tetraspanins such as CD9, CD63 and/or CD81. Vesicles comprising one or more tetraspanin are sometimes referred to as “Tet+” herein to indicate that the vesicles are tetraspanin-positive. The sorted microvesicles can be further assessed using methodology described herein. E.g., surface antigens on the sorted microvesicles can be detected using flow or other methods. In some embodiments, payload within the sorted microvesicles is assessed. As an illustrative example, a population of microvesicles is contacted with a labeled binding agent to a surface antigen of interest, the contacted microvesicles are sorted using flow cytometry, and payload with the microvesicles is assessed. The payload may be polypeptides, nucleic acids (e.g., mRNA or microRNA) or other biological entities as desired. Such assessment is used to characterize a phenotype as described herein, e.g., to diagnose, prognose or theranose a cancer.

[0277] In an embodiment, flow sorting is used to distinguish microvesicle populations from other biological complexes. In a non-limiting example, Ago2+/Tet+ and Ago2+/Tet-particles are detected using flow methodology to separate Ago2+ vesicles from vesicle-free Ago2+ complexes, respectively.

### Multiplexing

[0278] Multiplex experiments comprise experiments that can simultaneously measure multiple analytes in a single assay. Vesicles and associated biomarkers can be assessed in a multiplex fashion. Different binding agents can be used for multiplexing different circulating biomarkers, e.g., microRNA, protein, or vesicle populations. Different biomarkers, e.g., different vesicle populations, can be isolated or detected using different binding agents. Each population in a biological sample can be labeled with a different signaling label, such as a fluorophore, quantum dot, or radioactive label, such as described above. The label can be directly conjugated to a binding agent or indirectly used to detect a binding agent that binds a vesicle. The number of populations detected in a multiplexing assay is dependent on the resolution capability of the labels and the summation of signals, as more than two differentially labeled vesicle populations that bind two or more affinity elements can produce summed signals.

[0279] Multiplexing of at least 2, 3, 4, 5, 6, 7, 8, 9, 10, 11, 12, 13, 14, 15, 16, 17, 18, 19, 20, 25, 50, 75 or 100 different circulating biomarkers may be performed. For example, one population of vesicles specific to a cell-of-origin can be assayed along with a second population of vesicles specific to a different cell-of-origin, where each population is labeled with a different label. Alternatively, a population of vesicles with a particular biomarker or biosignature can be assayed along with a second population of vesicles with a different biomarker or biosignature. In some cases, hundreds or thousands of vesicles are assessed in a single assay.

[0280] In one embodiment, multiplex analysis is performed by applying a plurality of vesicles comprising more than one population of vesicles to a plurality of substrates, such as beads. Each bead is coupled to one or more capture agents. The plurality of beads is divided into subsets, where beads with the same capture agent or combination of capture agents form a subset of beads, such that each subset of beads has a different capture agent or combination of capture agents than another subset of beads. The beads can then be used to capture vesicles that comprise a component that binds to the capture agent. The different subsets can be used to capture different populations of vesicles. The captured vesicles can then be analyzed by detecting one or more biomarkers.

[0281] Flow cytometry can be used in combination with a particle-based or bead based assay. Multiparametric immunoassays or other high throughput detection assays using bead coatings with cognate ligands and reporter molecules with specific activities consistent with high sensitivity automation can be used. For example, beads in each subset can be differentially labeled from another subset. In a particle based assay system, a binding agent or capture agent for a vesicle, such as a capture antibody, can be immobilized on addressable beads or microspheres. Each binding agent for each individual binding assay (such as an immunoassay when the binding agent is an antibody) can be coupled to a distinct type of microsphere (i.e., microbead) and the binding assay reaction takes place on the surface of the microspheres. Microspheres can be distinguished by different labels, for example, a microsphere with a specific capture agent would have a different signaling label as compared to another microsphere with a different capture agent. For example, microspheres can be dyed with discrete fluorescence intensities such that the fluorescence intensity of a microsphere with a specific binding agent is different than that of another microsphere with a different binding agent. Biomarkers bound by different capture agents can be differentially detected using different labels.

[0282] A microsphere can be labeled or dyed with at least 2 different labels or dyes. In some embodiments, the microsphere is labeled with at least 3, 4, 5, 6, 7, 8, 9, or 10 different labels. Different microspheres in a plurality of microspheres can have more than one label or dye, wherein various subsets of the microspheres have various ratios and combinations of the labels or dyes permitting detection of different microspheres with different binding agents. For example, the various ratios and combinations of labels and dyes can permit different fluorescent intensities. Alternatively, the various ratios and combinations maybe used to generate different detection patters to identify the binding agent. The microspheres can be labeled or dyed externally or may have intrinsic fluorescence or signaling labels. Beads can be loaded separately with their appropriate binding agents and thus, different vesicle populations can be isolated based on the different binding agents on the differentially labeled microspheres to which the different binding agents are coupled.

[0283] In another embodiment, multiplex analysis can be performed using a planar substrate, wherein the substrate comprises a plurality of capture agents. The plurality of capture agents can capture one or more populations of vesicles, and one or more biomarkers of the captured vesicles detected. The planar substrate can be a microarray or other substrate as further described herein.

### Binding Agents

[0284] A vesicle may be isolated or detected using a binding agent for a novel component of a vesicle, such as an antibody for a novel antigen specific to a vesicle of interest. Novel antigens that are specific to a vesicle of interest may be isolated or identified using different test compounds of known composition bound to a substrate, such as an array or a plurality of particles, which can allow a large amount of chemical/structural space to be adequately sampled using only a small fraction of the space. The novel antigen identified can also serve as a biomarker for the vesicle. For example, a novel antigen identified for a cell-of-origin specific vesicle can be a useful biomarker.

[0285] The term “agent” or “reagent” as used in respect to contacting a sample can mean any entity designed to bind, hybridize, associate with or otherwise detect or facilitate detection of a target molecule, including target polypeptides, peptides, nucleic acid molecules, leptins, lipids, or any other biological entity that can be detected as described herein or as known in the art. Examples of such agents/reagents are well known in the art, and include but are not limited to universal or specific nucleic acid primers, nucleic acid probes, antibodies, aptamers, peptoid, peptide nucleic acid, locked nucleic acid, lectin, dendrimer, chemical compound, or other entities described herein or known in the art.

[0286] A binding agent can be identified by screening either a homogeneous or heterogeneous vesicle population against test compounds. Since the composition of each test compound on the substrate surface is known, this constitutes a screen for affinity elements. For example, a test compound array comprises test compounds at specific locations on the substrate addressable locations, and can be used to identify one or more binding agents for a vesicle. The test compounds can all be unrelated or related based on minor variations of a core sequence or structure. The different test compounds may include variants of a given test compound (such as polypeptide isoforms), test compounds that are structurally or compositionally unrelated, or a combination thereof.

[0287] A test compound can be a peptoid, polysaccharide, organic compound, inorganic compound, polymer, lipids, nucleic acid, polypeptide, antibody, protein, polysaccharide, or other compound. The test compound can be natural or synthetic. The test compound can comprise or consist of linear or branched heteropolymeric compounds based on any of a number of linkages or combinations of linkages (e.g., amide, ester, ether, thiol, radical additions, metal coordination, etc.), dendritic structures, circular structures, cavity structures or other structures with multiple nearby sites of attachment that serve as scaffolds upon which specific additions are made. The test compound can be spotted on a substrate or synthesized in situ, using standard methods in the art. In addition, the test compound can be spotted or synthesized in situ in combinations in order to detect useful interactions, such as cooperative binding.

[0288] The test compound can be a polypeptide with known amino acid sequence, thus, detection of a test compound binding with a vesicle can lead to identification of a polypeptide of known amino sequence that can be used as a binding agent. For example, a homogenous population of vesicles can be applied to a spotted array on a slide containing between a few and 1,000,000 test polypeptides having a length of variable amino acids. The polypeptides can be attached to the surface through the C-terminus. The sequence of the polypeptides can be generated randomly from 19 amino acids, excluding cysteine. The binding reaction can include a non-specific competitor, such as excess bacterial proteins labeled with another dye such that the specificity ratio for each polypeptide binding target can be determined. The polypeptides with the highest specificity and binding can be selected. The identity of the polypeptide on each spot is known, and thus can be readily identified. Once the novel antigens specific to the homogeneous vesicle population, such as a cell-of-origin specific vesicle is identified, such cell-of-origin specific vesicles may subsequently be isolated using such antigens in methods described hereafter.

[0289] An array can also be used for identifying an antibody as a binding agent for a vesicle. Test antibodies can be attached to an array and screened against a heterogeneous population of vesicles to identify antibodies that can be used to isolate or identify a vesicle. A homogeneous population of vesicles such as cell-of-origin specific vesicles can also be screened with an antibody array. Other than identifying antibodies to isolate or detect a homogeneous population of vesicles, one or more protein biomarkers specific to the homogenous population can be identified. Commercially available platforms with test antibodies pre-selected or custom selection of test antibodies attached to the array can be used. For example, an antibody array from Full Moon Biosystems can be screened using prostate cancer cell derived vesicles identifying antibodies to Bel-XL, ERCC1, Keratin 15, CD81/TAPA-1, CD9, Epithelial Specific Antigen (ESA), and Mast Cell Chymase as binding agents, and the proteins identified can be used as biomarkers for the vesicles. The biomarker can be present or absent, underexpressed or overexpressed, mutated, or modified in or on a vesicle and used in characterizing a condition.

[0290] An antibody or synthetic antibody to be used as a binding agent can also be identified through a peptide array. Another method is the use of synthetic antibody generation through antibody phage display. M13 bacteriophage libraries of antibodies (e.g. Fabs) are displayed on the surfaces of phage particles as fusions to a coat protein. Each phage particle displays a unique antibody and also encapsulates a vector that contains the encoding DNA. Highly diverse libraries can be constructed and represented as phage pools, which can be used in antibody selection for binding to immobilized antigens. Antigen-binding phages are retained by the immobilized antigen, and the nonbinding phages are removed by washing. The retained phage pool can be amplified by infection of an Escherichia coli host and the amplified pool can be used for additional rounds of selection to eventually obtain a population that is dominated by antigen-binding clones. At this stage, individual phase clones can be isolated and subjected to DNA sequencing to decode the sequences of the displayed antibodies. Through the use of phase display and other methods known in the art, high affinity designer antibodies for vesicles can be generated.

[0291] Bead-based assays can also be used to identify novel binding agents to isolate or detect a vesicle. A test antibody or peptide can be conjugated to a particle. For example, a bead can be conjugated to an antibody or peptide and used to detect and quantify the proteins expressed on the surface of a population of vesicles in order to discover and specifically select for novel antibodies that can target vesicles from specific tissue or tumor types. Any molecule of organic origin can be successfully conjugated to a polystyrene bead through use of a commercially available kit according to manufacturer's instructions. Each bead set can be colored a certain detectable wavelength and each can be linked to a known antibody or peptide which can be used to specifically measure which beads are linked to exosomal proteins matching the epitope of previously conjugated antibodies or peptides. The beads can be dyed with discrete fluorescence intensities such that each bead with a different intensity has a different binding agent as described above.

[0292] For example, a purified vesicle preparation can be diluted in assay buffer to an appropriate concentration according to empirically determined dynamic range of assay. A sufficient volume of coupled beads can be prepared and approximately 1 μl of the antibody-coupled beads can be aliquoted into a well and adjusted to a final volume of approximately 50 μl. Once the antibody-conjugated beads have been added to a vacuum compatible plate, the beads can be washed to ensure proper binding conditions. An appropriate volume of vesicle preparation can then be added to each well being tested and the mixture incubated, such as for 15-18 hours. A sufficient volume of detection antibodies using detection antibody diluent solution can be prepared and incubated with the mixture for 1 hour or more. The beads can then be washed before the addition of detection antibody (biotin expressing) mixture composed of streptavidin phycoereythin. The beads can then be washed and vacuum aspirated several times before analysis on a suspension array system using software provided with an instrument. The identity of antigens that can be used to selectively extract the vesicles can then be elucidated from the analysis.

[0293] Assays using imaging systems can be used to detect and quantify proteins expressed on the surface of a vesicle in order to discover and specifically select for and enrich vesicles from specific tissue, cell or tumor types. Antibodies, peptides or cells conjugated to multiple well multiplex carbon coated plates can be used. Simultaneous measurement of many analytes in a well can be achieved through the use of capture antibodies arrayed on the patterned carbon working surface. Analytes can then be detected with antibodies labeled with reagents in electrode wells with an enhanced electro-chemiluminescent plate. Any molecule of organic origin can be successfully conjugated to the carbon coated plate. Proteins expressed on the surface of vesicles can be identified from this assay and can be used as targets to specifically select for and enrich vesicles from specific tissue or tumor types.

[0294] The binding agent can also be an aptamer to a specific target. The term “specific” as used herein in regards to a binding agent can mean that an agent has a greater affinity for its target than other targets, typically with a much great affinity, but does not require that the binding agent is absolutely specific for its target.

### Microfluidics

[0295] The methods for isolating or identifying vesicles can be used in combination with microfluidic devices. The methods of isolating or detecting a vesicle, such as described herein, can be performed using a microfluidic device. Microfluidic devices, which may also be referred to as “lab-on-a-chip” systems, biomedical micro-electro-mechanical systems (bioMEMs), or multicomponent integrated systems, can be used for isolating and analyzing a vesicle. Such systems miniaturize and compartmentalize processes that allow for binding of vesicles, detection of biosignatures, and other processes.

[0296] A microfluidic device can also be used for isolation of a vesicle through size differential or affinity selection. For example, a microfluidic device can use one more channels for isolating a vesicle from a biological sample based on size or by using one or more binding agents for isolating a vesicle from a biological sample. A biological sample can be introduced into one or more microfluidic channels, which selectively allows the passage of a vesicle. The selection can be based on a property of the vesicle, such as the size, shape, deformability, or biosignature of the vesicle.

[0297] In one embodiment, a heterogeneous population of vesicles can be introduced into a microfluidic device, and one or more different homogeneous populations of vesicles can be obtained. For example, different channels can have different size selections or binding agents to select for different vesicle populations. Thus, a microfluidic device can isolate a plurality of vesicles wherein at least a subset of the plurality of vesicles comprises a different biosignature from another subset of the plurality of vesicles. For example, the microfluidic device can isolate at least 2, 3, 4, 5, 6, 7, 8, 9, 10, 15, 20, 25, 30, 40, 50, 60, 70, 80, 90, or 100 different subsets of vesicles, wherein each subset of vesicles comprises a different biosignature.

[0298] In some embodiments, the microfluidic device can comprise one or more channels that permit further enrichment or selection of a vesicle. A population of vesicles that has been enriched after passage through a first channel can be introduced into a second channel, which allows the passage of the desired vesicle or vesicle population to be further enriched, such as through one or more binding agents present in the second channel.

[0299] Array-based assays and bead-based assays can be used with microfluidic device. For example, the binding agent can be coupled to beads and the binding reaction between the beads and vesicle can be performed in a microfluidic device. Multiplexing can also be performed using a microfluidic device. Different compartments can comprise different binding agents for different populations of vesicles, where each population is of a different cell-of-origin specific vesicle population. In one embodiment, each population has a different biosignature. The hybridization reaction between the microsphere and vesicle can be performed in a microfluidic device and the reaction mixture can be delivered to a detection device. The detection device, such as a dual or multiple laser detection system can be part of the microfluidic system and can use a laser to identify each bead or microsphere by its color-coding, and another laser can detect the hybridization signal associated with each bead.

[0300] Various microfluidic devices and methods are described above.

### Combined Isolation Methodology

[0301] One of skill will appreciate that various methods of sample treatment and isolating and concentrating circulating biomarkers such as vesicles can be combined as desired. For example, a biological sample can be treated to prevent aggregation, remove undesired particulate and/or deplete highly abundant proteins. The steps used can be chosen to optimize downstream analysis steps. Next, biomarkers such as vesicles can be isolated, e.g., by chromotography, centrifugation, density gradient, filtration, precipitation, or affinity techniques. Any number of the later steps can be combined, e.g., a sample could be subjected to one or more of chromotography, centrifugation, density gradient, filtration and precipitation in order to isolate or concentrate all or most microvesicles. In a subsequent step, affinity techniques, e.g., using binding agents to one or more target of interest, can be used to isolate or identify microvesicles carrying desired biomarker profiles. Microfluidic systems can be employed to perform some or all of these steps.

[0302] An exemplary yet non-limiting isolation scheme for isolating and analysis of microvesicles includes the following: Plasma or serum collection->highly abundant protein removal->ultrafiltration->nanomembrane concentration->flow cytometry or particle-based assay.

[0303] Using the methods disclosed herein or known in the art, circulating biomarkers such as vesicles can be isolated or concentrated by at least about 2-fold, 3-fold, 1-fold, 2-fold, 3-fold, 4-fold, 5-fold, 6-fold, 7-fold, 8-fold, 9-fold, 10-fold, 12-fold, 15-fold, 20-fold, 25-fold, 30-fold, 35-fold, 40-fold, 45-fold, 50-fold, 55-fold, 60-fold, 65-fold, 70-fold, 75-fold, 80-fold, 90-fold, 95-fold, 100-fold, 110-fold, 120-fold, 125-fold, 130-fold, 140-fold, 150-fold, 160-fold, 170-fold, 175-fold, 180-fold, 190-fold, 200-fold, 205-fold, 250-fold, 275-fold, 300-fold, 325-fold, 350-fold, 375-fold, 400-fold, 425-fold, 450-fold, 475-fold, 500-fold, 525-fold, 550-fold, 575-fold, 600-fold, 625-fold, 650-fold, 675-fold, 700-fold, 725-fold, 750-fold, 775-fold, 800-fold, 825-fold, 850-fold, 875-fold, 900-fold, 925-fold, 950-fold, 975-fold, 1000-fold, 1500-fold, 2000-fold, 2500-fold, 3000-fold, 4000-fold, 5000-fold, 6000-fold, 7000-fold, 8000-fold, 9000-fold, or at least 10,000-fold. In some embodiments, the vesicles are isolated or concentrated concentrated by at least 1 order of magnitude, 2 orders of magnitude, 3 orders of magnitude, 4 orders of magnitude, 5 orders of magnitude, 6 orders of magnitude, 7 orders of magnitude, 8 orders of magnitude, 9 orders of magnitude, or 10 orders of magnitude or more.

[0304] Once concentrated or isolated, the circulating biomarkers can be assessed, e.g., in order to characterize a phenotype as described herein. In some embodiments, the concentration or isolation steps themselves shed light on the phenotype of interest. For example, affinity methods can detect the presence or level of specific biomarkers of interest.

[0305] The various isolation and detection systems described herein can be used to isolate or detect circulating biomarkers such as vesicles that are informative for diagnosis, prognosis, disease stratification, theranosis, prediction of responder/non-responder status, disease monitoring, treatment monitoring and the like as related to such diseases and disorders. Combinations of the isolation techniques are within the scope of the invention. In a non-limiting example, a sample can be run through a chromatography column to isolate vesicles based on a property such as size of electrophoretic motility, and the vesicles can then be passed through a microfluidic device. Binding agents can be used before, during or after these steps.

[0306] The methods and compositions of the invention can be used with microvesicles isolated or detected using such methods as described herein. In various non-limiting examples: an aptamer provided by the methods of the invention can be used as a capture and/or detector agent for a biomarker such as a protein or microvesicle; a sample such as a bodily fluid can be contacted with an oligonucleotide probe library of the invention before microvesicles in the sample are isolated using one or more technique described herein (e.g., chromatography, centrifugation, flow cytometry, filtration, affinity isolation, polymer precipitation, etc); microvesicles in a sample are isolated using one or more technique described herein (e.g., chromatography, centrifugation, flow cytometry, filtration, affinity isolation, polymer precipitation, etc) before contacting the microvesicles with an aptamer or oligonucleotide probe library of the invention. Contaminants such as highly abundant proteins can be removed in whole or in part at any appropriate step in such processes. These and various other useful iterations of such techniques for assessment of microvesicles and other biomarkers are contemplated by the invention.

### Biomarkers

[0307] As described herein, the methods and compositions of the invention can be used in assays to detect the presence or level of one or more biomarker of interest. The biomarker can be any useful biomarker disclosed herein or known to those of skill in the art. In an embodiment, the biomarker comprises a protein or polypeptide. As used herein, “protein,” “polypeptide” and “peptide” are used interchangeably unless stated otherwise. The biomarker can be a nucleic acid, including DNA, RNA, and various subspecies of any thereof as disclosed herein or known in the art. The biomarker can comprise a lipid. The biomarker can comprise a carbohydrate. The biomarker can also be a complex, e.g., a complex comprising protein, nucleic acids, lipids and/or carbohydrates. In some embodiments, the biomarker comprises a microvesicle. In an embodiment, the invention provides a method wherein a pool of aptamers is used to assess the presence and/or level of a population of microvesicles of interest without knowing the precise microvesicle antigen targeted by each member of the pool. See, e.g., FIGS. 19B-C. In other cases, biomarkers associated with microvesicles are assessed according to the methods of the invention. See, e.g., FIGS. 2A-F; FIG. 19A.

[0308] A biosignature comprising more than one biomarker can comprise one type of biomarker or multiple types of biomarkers. As a non-limiting example, a biosignature can comprise multiple proteins, multiple nucleic acids, multiple lipids, multiple carbohydrates, multiple biomarker complexes, multiple microvesicles, or a combination of any thereof. For example, the biosignature may comprise one or more microvesicle, one or more protein, and one or more microRNA, wherein the one or more protein and/or one or more microRNA is optionally in association with the microvesicle as a surface antigen and/or payload, as appropriate.

[0309] In some embodiments, vesicles are detected using vesicle surface antigens. A commonly expressed vesicle surface antigen can be referred to as a “housekeeping protein,” or general vesicle biomarker. The biomarker can be CD63, CD9, CD81, CD82, CD37, CD53, Rab-5b, Annexin V or MFG-E8. Tetraspanins, a family of membrane proteins with four transmembrane domains, can be used as general vesicle biomarkers. The tetraspanins include CD151, CD53, CD37, CD82, CD81, CD9 and CD63. There have been over 30 tetraspanins identified in mammals, including the TSPAN1 (TSP-1), TSPAN2 (TSP-2), TSPAN3 (TSP-3), TSPAN4 (TSP-4, NAG-2), TSPAN5 (TSP-5), TSPAN6 (TSP-6), TSPAN7 (CD231, TALLA-1, A15), TSPAN8 (CO-029), TSPAN9 (NET-5), TSPAN1O (Oculospanin), TSPAN11 (CD151-like), TSPAN12 (NET-2), TSPAN13 (NET-6), TSPAN14, TSPAN15 (NET-7), TSPAN16 (TM4-B), TSPAN17, TSPAN18, TSPAN19, TSPAN20 (UP1b, UPK1B), TSPAN21 (UP1a, UPK1A), TSPAN22 (RDS, PRPH2), TSPAN23 (ROM), TSPAN24 (CD151), TSPAN25 (CD53), TSPAN26 (CD37), TSPAN27 (CD82), TSPAN28 (CD81), TSPAN29 (CD9), TSPAN3d (CD63), TSPAN31 (SAS), TSPAN32 (TSSC6), TSPAN33, and TSPAN34. Other commonly observed vesicle markers include those listed in Table 3. One or more of these proteins can be useful biomarkers for the characterizing a phenotype using the subject methods and compositions.

TABLE 3
Proteins Observed in Vesicles from Multiple Cell Types

| Class | Protein |
|---|---|
| Antigen Presentation | MHC class I, MHC class II, Integrins, Alpha 4 beta 1, Alpha M beta 2, |
| | Beta 2 |
| Immunoglobulin family | ICAM1/CD54, P-selection |
| Cell-surface peptidases | Dipeptidylpeptidase IV/CD26, Aminopeptidase n/CD13 |
| Tetraspanins | CD151, CD53, CD37, CD82, CD81, CD9 and CD63 |
| Heat-shock proteins | Hsp70, Hsp84/90 |
| Cytoskeletal proteins | Actin, Actin-binding proteins, Tubulin |
| Membrane transport | Annexin I, Annexin II, Annexin IV, Annexin V, Annexin VI, |
| and fusion | RAB7/RAP1B/RADGDI |
| Signal transduction | Gi2alpha/14-3-3, CBL/LCK |
| Abundant membrane | CD63, GAPDH, CD9, CD81, ANXA2, ENO1, SDCBP, MSN, MFGE8, |
| proteins | EZR, GK, ANXA1, LAMP2, DPP4, TSG101, HSPA1A, GDI2, CLTC, |
| | LAMP1, Cd86, ANPEP, TFRC, SLC3A2, RDX, RAP1B, RAB5C, |
| | RAB5B, MYH9, ICAM1, FN1, RAB11B, PIGR, LGALS3, ITGB1, |
| | EHD1, CLIC1, ATP1A1, ARF1, RAP1A, P4HB, MUC1, KRT10, |
| | HLA-A, FLOT1, CD59, C1orf58, BASP1, TACSTD1, STOM |
| Other Transmembrane | Cadherins: CDH1, CDH2, CDH12, CDH3, Deomoglein, DSG1, DSG2, |
| Proteins | DSG3, DSG4, Desmocollin, DSC1, DSC2, DSC3, Protocadherins, |
| | PCDH1, PCDH10, PCDH11x, PCDH11y, PCDH12, FAT, FAT2, FAT4, |
| | PCDH15, PCDH17, PCDH18, PCDH19; PCDH20; PCDH7, PCDH8, |
| | PCDH9, PCDHA1, PCDHA10, PCDHA11, PCDHA12, PCDHA13, |
| | PCDHA2, PCDHA3, PCDHA4, PCDHA5, PCDHA6, PCDHA7, |
| | PCDHA8, PCDHA9, PCDHAC1, PCDHAC2, PCDHB1, PCDHB10, |
| | PCDHB11, PCDHB12, PCDHB13, PCDHB14, PCDHB15, PCDHB16, |
| | PCDHB17, PCDHB18, PCDHB2, PCDHB3, PCDHB4, PCDHB5, |
| | PCDHB6, PCDHB7, PCDHB8, PCDHB9, PCDHGA1, PCDHGA10, |
| | PCDHGA11, PCDHGA12, PCDHGA2; PCDHGA3, PCDHGA4, |
| | PCDHGA5, PCDHGA6, PCDHGA7, PCDHGA8, PCDHGA9, |
| | PCDHGB1, PCDHGB2, PCDHGB3, PCDHGB4, PCDHGB5, |
| | PCDHGB6, PCDHGB7, PCDHGC3, PCDHGC4, PCDHGC5, CDH9 |
| | (cadherin 9, type 2 (T1-cadherin)), CDH10 (cadherin 10, type 2 (T2- |
| | cadherin)), CDH5 (VE-cadherin (vascular endothelial)), CDH6 |
| | (K-cadherin (kidney)), CDH7 (cadherin 7, type 2), CDH8 (cadherin 8, type |
| | 2), CDH11 (OB-cadherin (osteoblast)), CDH13 (T-cadherin - H-cadherin |
| | (heart)), CDH15 (M-cadherin (myotubule)), CDH16 (KSP-cadherin), |
| | CDH17 (LI cadherin (liver-intestine)), CDH18 (cadherin 18, type 2), |
| | CDH19 (cadherin 19, type 2), CDH20 (cadherin 20, type 2), CDH23 |
| | (cadherin 23, (neurosensory epithelium)), CDH10, CDH11, CDH13, |
| | CDH15, CDH16, CDH17, CDH18, CDH19, CDH22, CDH23, CDH24, |
| | CDH26, CDH28, CDH4, CDH5, CDH6, CDH7, CDH8, CDH9, |
| | CELSR1, CELSR2, CELSR3, CLSTN1, CLSTN2, CLSTN3, DCHS1, |
| | DCHS2, LOC389118, PCLKC, RESDA1, RET |

[0310] Any of the types of biomarkers or specific biomarkers described herein can be used and/or assessed via the subject methods and compositions, e.g., to identify a useful biosignature. Exemplary biomarkers include without limitation those in Table 4. The markers can be detected as protein, RNA or DNA as appropriate, which can be circulating freely or in a complex with other biological molecules. As appropriate, the markers in Table 4 can also be used for capture and/or detection of vesicles for characterizing phenotypes as disclosed herein. In some cases, multiple capture and/or detectors are used to enhance the characterization. The markers can be detected as protein or as mRNA, which can be circulating freely or in a complex with other biological molecules. See, e.g., FIGS. 2D-E. The markers can be detected as vesicle surface antigens and/or vesicle payload. The “Illustrative Class” indicates indications for which the markers are known markers. Those of skill will appreciate that the markers can also be used in alternate settings in certain instances. For example, a marker which can be used to characterize one type disease may also be used to characterize another disease as appropriate. Consider a non-limiting example of a tumor marker which can be used as a biomarker for tumors from various lineages. The biomarker references in Tables 3 and 4 are those commonly used in the art. Gene aliases and descriptions can be found using a variety of online databases, including GeneCards® (www.genecards.org), HUGO Gene Nomenclature (www.genenames.org), Entrez Gene (www.ncbi.nlm.nih.gov/entrez/query.fcgi?db=gene), UniProtKB/Swiss-Prot (www.uniprot.org), UniProtKB/TrEMBL (www.uniprot.org), OMIM (www.ncbi.nlm.nih.gov/entrez/query.fcgi?db=OMIM), GeneLoc (genecards.weizmann.ac.il/geneloc/), and Ensembl (www.ensembl.org). Generally, gene symbols and names below correspond to those approved by HUGO, and protein names are those recommended by UniProtKB/Swiss-Prot. Common alternatives are provided as well. In some cases, biomarkers are referred to by Ensembl reference numbers, which are of the form “ENSG” followed by a number, e.g., ENSG00000005893 which corresponds to LAMP2. In Table 4, solely for sake of brevity, “E.” is sometimes used to represent “ENSG00000”. For example, “E.005893 represents “ENSG00000005893.” Where a protein name indicates a precursor, the mature protein is also implied. Throughout the application, gene and protein symbols may be used interchangeably and the meaning can be derived from context as necessary.

TABLE 4
Illustrative Biomarkers

| Illustrative Class | Biomarkers |
|---|---|
| Drug associated | ABCC1, ABCG2, ACE2, ADA, ADH1C, ADH4, AGT, AR, AREG, ASNS, BCL2, BCRP, |
| targets and | BDCA1, beta III tubulin, BIRC5, B-RAF, BRCA1, BRCA2, CA2, caveolin, CD20, CD25, |
| prognostic markers | CD33, CD52, CDA, CDKN2A, CDKN1A, CDKN1B, CDK2, CDW52, CES2, CK 14, CK |
| | 17, CK 5/6, c-KIT, c-Met, c-Myc, COX-2, Cyclin D1, DCK, DHFR, DNMT1, DNMT3A, |
| | DNMT3B, E-Cadherin, ECGF1, EGFR, EML4-ALK fusion, EPHA2, Epiregulin, ER, |
| | ERBR2, ERCC1, ERCC3, EREG, ESR1, FLT1, folate receptor, FOLR1, FOLR2, FSHB, |
| | FSHPRH1, FSHR, FYN, GART, GNA11, GNAQ, GNRH1, GNRHR1, GSTP1, HCK, |
| | HDAC1, hENT-1, Her2/Neu, HGF, HIF1A, HIG1, HSP90, HSP90AA1, HSPCA, IGF-1R, |
| | IGFRBP, IGFRBP3, IGFRBP4, IGFRBP5, IL13RA1, IL2RA, KDR, Ki67, KIT, K-RAS, |
| | LCK, LTB, Lymphotoxin Beta Receptor, LYN, MET, MGMT, MLH1, MMR, MRP1, |
| | MS4A1, MSH2, MSH5, Myc, NFKB1, NFKB2, NFKBIA, NRAS, ODC1, OGFR, p16, p21, |
| | p27, p53, p95, PARP-1, PDGFC, PDGFR, PDGFRA, PDGFRB, PGP, PGR, PI3K, POLA, |
| | POLA1, PPARG, PPARGC1, PR, PTEN, PTGS2, PTPN12, RAF1, RARA, ROS1, RRM1, |
| | RRM2, RRM2B, RXRB, RXRG, SIK2, SPARC, SRC, SSTR1, SSTR2, SSTR3, SSTR4, |
| | SSTR5, Survivin, TK1, TLE3, TNF, TOP1, TOP2A, TOP2B, TS, TUBB3, TXN, TXNRD1, |
| | TYMS, VDR, VEGF, VEGFA, VEGFC, VHL, YES1, ZAP70 |
| Drug associated | ABL1, STK11, FGFR2, ERBB4, SMARCB1, CDKN2A, CTNNB1, FGFR1, FLT3, |
| targets and | NOTCH1, NPM1, SRC, SMAD4, FBXW7, PTEN, TP53, AKT1, ALK, APC, CDH1, C-Met, |
| prognostic markers | HRAS, IDH1, JAK2, MPL, PDGFRA, SMO, VHL, ATM, CSF1R, FGFR3, GNAS, ERBB2, |
| | HNF1A, JAK3, KDR, MLH1, PTPN11, RB1, RET, c-Kit, EGFR, PIK3CA, NRAS, GNA11, |
| | GNAQ, KRAS, BRAF |
| Drug associated | ALK, AR, BRAF, cKIT, cMET, EGFR, ER, ERCC1, GNA11, HER2, IDH1, KRAS, MGMT, |
| targets and | MGMT promoter methylation, NRAS, PDGFRA, Pgp, PIK3CA, PR, PTEN, ROS1, RRM1, |
| prognostic markers | SPARC, TLE3, TOP2A, TOPO1, TS, TUBB3, VHL |
| Drug associated | ABL1, AKT1, ALK, APC, AR, ATM, BRAF, BRAF, BRCA1, BRCA2, CDH1, cKIT, |
| targets | cMET, CSF1R, CTNNB1, EGFR, EGFR (H-score), EGFRvIII, ER, ERBB2 (HER2), |
| | ERBB4, ERCC1, FBXW7, FGFR1, FGFR2, FLT3, GNA11, GNAQ, GNAS, HER2, |
| | HNF1A, HRAS, IDH1, IDH2, JAK2, JAK3, KDR (VEGFR2), KRAS, MGMT, MGMT |
| | Promoter Methylation, microsatellite instability (MSI), MLH1, MPL, MSH2, MSH6, |
| | NOTCH1, NPM1, NRAS, PD-1, PDGFRA, PD-L1, Pgp, PIK3CA, PMS2, PR, PTEN, |
| | PTPN11, RB1, RET, ROS1, RRM1, SMAD4, SMARCB1, SMO, SPARC, STK11, TLE3, |
| | TOP2A, TOPO1, TP53, TS, TUBB3, VHL |
| Drug associated | 1p19q co-deletion, ABL1, AKT1, ALK, APC, AR, ARAF, ATM, BAP1, BRAF, BRCA1, |
| targets | BRCA2, CDH1, CHEK1, CHEK2, cKIT, cMET, CSF1R, CTNNB1, DDR2, EGFR, |
| | EGFRvIII, ER, ERBB2 (HER2), ERBB3, ERBB4, ERCC1, FBXW7, FGFR1, FGFR2, FLT3, |
| | GNA11, GNAQ, GNAS, H3K36me3, HER2, HNF1A, HRAS, IDH1, IDH2, JAK2, JAK3, |
| | KDR (VEGFR2), KRAS, MDMT, MGMT, MGMT Methylation, Microsatellite instability, |
| | MLH1, MPL, MSH2, MSH6, NF1, NOTCH1, NPM1, NRAS, NY-ESO-1, PD-1, PDGFRA, |
| | PD-L1, Pgp, PIK3CA, PMS2, PR, PTEN, PTPN11, RAF1, RB1, RET, ROS1, ROS1, RRM1, |
| | SMAD4, SMARCB1, SMO, SPARC, STK11, TLE3, TOP2A, TOPO1, TP53, TRKA, TS, |
| | TUBB3, VHL, WT1 |
| Drug associated | ABL1, AKT1, ALK, APC, AR, ATM, BRAF, BRAF, BRCA1, BRCA2, CDH1, cKIT, |
| targets | cMET, CSF1R, CTNNB1, EGFR, EGFR (H-score), EGFRvIII, ER, ERBB2 (HER2), |
| | ERBB4, ERCC1, FBXW7, FGFR1, FGFR2, FLT3, GNA11, GNAQ, GNAS, HER2, |
| | HNF1A, HRAS, IDH1, IDH2, JAK2, JAK3, KDR (VEGFR2), KRAS, MGMT, MGMT |
| | Promoter Methylation, microsatellite instability (MSI), MLH1, MPL, MSH2, MSH6, |
| | NOTCH1, NPM1, NRAS, PD-1, PDGFRA, PD-L1, Pgp, PIK3CA, PMS2, PR, PTEN, |
| | PTPN11, RB1, RET, ROS1, RRM1, SMAD4, SMARCB1, SMO, SPARC, STK11, TLE3, |
| | TOP2A, TOPO1, TP53, TS, TUBB3, VHL |
| Drug associated | 1p19q, ALK, ALK (2p23), Androgen Receptor, BRCA, cMET, EGFR, EGFR, EGFRvIII, |
| targets | ER, ERCC1, Her2, Her2/Neu, MGMT, MGMT Promoter Methylation, microsatellite |
| | instability (MSI), MLH1, MSH2, MSH6, PD-1, PD-L1, PMS2, PR, PTEN, ROS1, RRM1, |
| | TLE3, TOP2A, TOP2A, TOPO1, TS, TUBB3 |
| Drug associated | TOP2A, Chromosome 17 alteration, PBRM1 (PB1/BAF180), BAP1, SETD2 (ANTI- |
| targets | HISTONE H3), MDM2, Chromosome 12 alteration, ALK, CTLA4, CD3, NY-ESO-1, |
| | MAGE-A, TP, EGFR |
| 5-aminosalicyclic | μ-protocadherin, KLF4, CEBPα |
| acid (5-ASA) | |
| efficacy | |
| Cancer treatment | AR, AREG (Amphiregulin), BRAF, BRCA1, cKIT, cMET, EGFR, EGFR w/T790M, EML4- |
| associated markers | ALK, ER, ERBB3, ERBB4, ERCC1, EREG, GNA11, GNAQ, hENT-1, Her2, Her2 Exon 20 |
| | insert, IGF1R, Ki67, KRAS, MGMT, MGMT methylation, MSH2, MSI, NRAS, PGP |
| | (MDR1), PIK3CA, PR, PTEN, ROS1, ROS1 translocation, RRM1, SPARC, TLE3, TOPO1, |
| | TOPO2A, TS, TUBB3, VEGFR2 |
| Cancer treatment | AR, AREG, BRAF, BRCA1, cKIT, cMET, EGFR, EGFR w/T790M, EML4-ALK, ER, |
| associated markers | ERBB3, ERBB4, ERCC1, EREG, GNA11, GNAQ, Her2, Her2 Exon 20 insert, IGFR1, Ki67, |
| | KRAS, MGMT-Me, MSH2, MSI, NRAS, PGP (MDR-1), PIK3CA, PR, PTEN, ROS1 |
| | translocation, RRM1, SPARC, TLE3, TOPO1, TOPO2A, TS, TUBB3, VEGFR2 |
| Colon cancer | AREG, BRAF, EGFR, EML4-ALK, ERCC1, EREG, KRAS, MSI, NRAS, PIK3CA, PTEN, |
| treatment | TS, VEGFR2 |
| associated markers | |
| Colon cancer | AREG, BRAF, EGFR, EML4-ALK, ERCC1, EREG, KRAS, MSI, NRAS, PIK3CA, PTEN, |
| treatment | TS, VEGFR2 |
| associated markers | |
| Melanoma | BRAF, cKIT, ERBB3, ERBB4, ERCC1, GNA11, GNAQ, MGMT, MGMT methylation, |
| treatment | NRAS, PIK3CA, TUBB3, VEGFR2 |
| associated markers | |
| Melanoma | BRAF, cKIT, ERBB3, ERBB4, ERCC1, GNA11, GNAQ, MGMT-Me, NRAS, PIK3CA, |
| treatment | TUBB3, VEGFR2 |
| associated markers | |
| Ovarian cancer | BRCA1, cMET, EML4-ALK, ER, ERBB3, ERCC1, hENT-1, HER2, IGF1R, PGP(MDR1), |
| treatment | PIK3CA, PR, PTEN, RRM1, TLE3, TOPO1, TOPO2A, TS |
| associated markers | |
| Ovarian cancer | BRCA1, cMET, EML4-ALK (translocation), ER, ERBB3, ERCC1, HER2, PIK3CA, PR, |
| treatment | PTEN, RRM1, TLE3, TS |
| associated markers | |
| Breast cancer | BRAF, BRCA1, EGFR, EGFR T790M, EML4-ALK, ER, ERBB3, ERCC1, HER2, Ki67, |
| treatment | PGP (MDR1), PIK3CA, PR, PTEN, ROS1, ROS1 translocation, RRM1, TLE3, TOPO1, |
| associated markers | TOPO2A, TS |
| Breast cancer | BRAF, BRCA1, EGFR w/T790M, EML4-ALK, ER, ERBB3, ERCC1, HER2, Ki67, KRAS, |
| treatment | PIK3CA, PR, PTEN, ROS1 translocation, RRM1, TLE3, TOPO1, TOPO2A, TS |
| associated markers | |
| NSCLC cancer | BRAF, BRCA1, cMET, EGFR, EGFR w/T790M, EML4-ALK, ERCC1, Her2 Exon 20 |
| treatment | insert, KRAS, MSH2, PIK3CA, PTEN, ROS1 (trans), RRM1, TLE3, TS, VEGFR2 |
| associated markers | |
| NSCLC cancer | BRAF, cMET, EGFR, EGFR w/T790M, EML4-ALK, ERCC1, Her2 Exon 20 insert, KRAS, |
| treatment | MSH2, PIK3CA, PTEN, ROS1 translocation, RRM1, TLE3, TS |
| associated markers | |
| Mutated in cancers | AKT1, ALK, APC, ATM, BRAF, CDH1, CDKN2A, c-Kit, C-Met, CSF1R, CTNNB1, |
| | EGFR, ERBB2, ERBB4, FBXW7, FGFR1, FGFR2, FGFR3, FLT3, GNA11, GNAQ, GNAS, |
| | HNF1A, HRAS, IDH1, JAK2, JAK3, KDR, KRAS, MLH1, MPL, NOTCH1, NPM1, NRAS, |
| | PDGFRA, PIK3CA, PTEN, PTPN11, RB1, RET, SMAD4, SMARCB1, SMO, SRC, STK11, |
| | TP53, VHL |
| Mutated in cancers | ALK, BRAF, BRCA1, BRCA2, EGFR, ERRB2, GNA11, GNAQ, IDH1, IDH2, KIT, KRAS, |
| | MET, NRAS, PDGFRA, PIK3CA, PTEN, RET, SRC, TP53 |
| Mutated in cancers | AKT1, HRAS, GNAS, MEK1, MEK2, ERK1, ERK2, ERBB3, CDKN2A, PDGFRB, IFG1R, |
| | FGFR1, FGFR2, FGFR3, ERBB4, SMO, DDR2, GRB1, PTCH, SHH, PD1, UGT1A1, BIM, |
| | ESR1, MLL, AR, CDK4, SMAD4 |
| Mutated in cancers | ABL, APC, ATM, CDH1, CSFR1, CTNNB1, FBXW7, FLT3, HNF1A, JAK2, JAK3, KDR, |
| | MLH1, MPL, NOTCH1, NPM1, PTPN11, RB1, SMARCB1, STK11, VHL |
| Mutated in cancers | ABL1, AKT1, AKT2, AKT3, ALK, APC, AR, ARAF, ARFRP1, ARID1A, ARID2, ASXL1, |
| | ATM, ATR, ATRX, AURKA, AURKB, AXL, BAP1, BARD1, BCL2, BCL2L2, BCL6, |
| | BCOR, BCORL1, BLM, BRAF, BRCA1, BRCA2, BRIP1, BTK, CARD11, CBFB, CBL, |
| | CCND1, CCND2, CCND3, CCNE1, CD79A, CD79B, CDC73, CDH1, CDK12, CDK4, |
| | CDK6, CDK8, CDKN1B, CDKN2A, CDKN2B, CDKN2C, CEBPA, CHEK1, CHEK2, CIC, |
| | CREBBP, CRKL, CRLF2, CSF1R, CTCF, CTNNA1, CTNNB1, DAXX, DDR2, DNMT3A, |
| | DOT1L, EGFR, EMSY (C11orf30), EP300, EPHA3, EPHA5, EPHB1, ERBB2, ERBB3, |
| | ERBB4, ERG, ESR1, EZH2, FAM123B (WTX), FAM46C, FANCA, FANCC, FANCD2, |
| | FANCE, FANCF, FANCG, FANCL, FBXW7, FGF10, FGF14, FGF19, FGF23, FGF3, |
| | FGF4, FGF6, FGFR1, FGFR2, FGFR3, FGFR4, FLT1, FLT3, FLT4, FOXL2, GATA1, |
| | GATA2, GATA3, GID4 (C17orf39), GNA11, GNA13, GNAQ, GNAS, GPR124, GRIN2A, |
| | GSK3B, HGF, HRAS, IDH1, IDH2, IGF1R, IKBKE, IKZF1, IL7R, INHBA, IRF4, IRS2, |
| | JAK1, JAK2, JAK3, JUN, KAT6A (MYST3), KDM5A, KDM5C, KDM6A, KDR, KEAP1, |
| | KIT, KLHL6, KRAS, LRP1B, MAP2K1, MAP2K2, MAP2K4, MAP3K1, MCL1, MDM2, |
| | MDM4, MED12, MEF2B, MEN1, MET, MITF, MLH1, MLL, MLL2, MPL, MRE11A, |
| | MSH2, MSH6, MTOR, MUTYH, MYC, MYCL1, MYCN, MYD88, NF1, NF2, NFE2L2, |
| | NFKBIA, NKX2-1, NOTCH1, NOTCH2, NPM1, NRAS, NTRK1, NTRK2, NTRK3, |
| | NUP93, PAK3, PALB2, PAX5, PBRM1, PDGFRA, PDGFRB, PDK1, PIK3CA, PIK3CG, |
| | PIK3R1, PIK3R2, PPP2R1A, PRDM1, PRKAR1A, PRKDC, PTCH1, PTEN, PTPN11, |
| | RAD50, RAD51, RAF1, RARA, RB1, RET, RICTOR, RNF43, RPTOR, RUNX1, SETD2, |
| | SF3B1, SMAD2, SMAD4, SMARCA4, SMARCB1, SMO, SOCS1, SOX10, SOX2, SPEN, |
| | SPOP, SRC, STAG2, STAT4, STK11, SUFU, TET2, TGFBR2, TNFAIP3, TNFRSF14, |
| | TOP1, TP53, TSC1, TSC2, TSHR, VHL, WISP3, WT1, XPO1, ZNF217, ZNF703 |
| Gene | ALK, BCR, BCL2, BRAF, EGFR, ETV1, ETV4, ETV5, ETV6, EWSR1, MLL, MYC, |
| rearrangement in | NTRK1, PDGFRA, RAF1, RARA, RET, ROS1, TMPRSS2 |
| cancer | |
| Cancer Related | ABL1, ACE2, ADA, ADH1C, ADH4, AGT, AKT1, AKT2, AKT3, ALK, APC, AR, ARAF, |
| | AREG, ARFRP1, ARID1A, ARID2, ASNS, ASXL1, ATM, ATR, ATRX, AURKA, |
| | AURKB, AXL, BAP1, BARD1, BCL2, BCL2L2, BCL6, BCOR, BCORL1, BCR, BIRC5 |
| | (survivin), BLM, BRAF, BRCA1, BRCA2, BRIP1, BTK, CA2, CARD11, CAV, CBFB, |
| | CBL, CCND1, CCND2, CCND3, CCNE1, CD33, CD52 (CDW52), CD79A, CD79B, |
| | CDC73, CDH1, CDK12, CDK2, CDK4, CDK6, CDK8, CDKN1B, CDKN2A, CDKN2B, |
| | CDKN2C, CEBPA, CES2, CHEK1, CHEK2, CIC, CREBBP, CRKL, CRLF2, CSF1R, |
| | CTCF, CTNNA1, CTNNB1, DAXX, DCK, DDR2, DHFR, DNMT1, DNMT3A, DNMT3B, |
| | DOT1L, EGFR, EMSY (C11orf30), EP300, EPHA2, EPHA3, EPHA5, EPHB1, ERBB2, |
| | ERBB3, ERBB4, ERBR2 (typo?), ERCC3, EREG, ERG, ESR1, ETV1, ETV4, ETV5, ETV6, |
| | EWSR1, EZH2, FAM123B (WTX), FAM46C, FANCA, FANCC, FANCD2, FANCE, |
| | FANCF, FANCG, FANCL, FBXW7, FGF10, FGF14, FGF19, FGF23, FGF3, FGF4, FGF6, |
| | FGFR1, FGFR2, FGFR3, FGFR4, FLT1, FLT3, FLT4, FOLR1, FOLR2, FOXL2, FSHB, |
| | FSHPRH1, FSHR, GART, GATA1, GATA2, GATA3, GID4 (C17orf39), GNA11, GNA13, |
| | GNAQ, GNAS, GNRH1, GNRHR1, GPR124, GRIN2A, GSK3B, GSTP1, HDAC1, HGF, |
| | HIG1, HNF1A, HRAS, HSPCA (HSP90), IDH1, IDH2, IGF1R, IKBKE, IKZF1, IL13RA1, |
| | IL2, IL2RA (CD25), IL7R, INHBA, IRF4, IRS2, JAK1, JAK2, JAK3, JUN, KAT6A |
| | (MYST3), KDM5A, KDM5C, KDM6A, KDR (VEGFR2), KEAP1, KIT, KLHL6, KRAS, |
| | LCK, LRP1B, LTB, LTBR, MAP2K1, MAP2K2, MAP2K4, MAP3K1, MAPK, MCL1, |
| | MDM2, MDM4, MED12, MEF2B, MEN1, MET, MGMT, MITF, MLH1, MLL, MLL2, |
| | MPL, MRE11A, MS4A1 (CD20), MSH2, MSH6, MTAP, MTOR, MUTYH, MYC, MYCL1, |
| | MYCN, MYD88, NF1, NF2, NFE2L2, NFKB1, NFKB2, NFKBIA, NGF, NKX2-1, |
| | NOTCH1, NOTCH2, NPM1, NRAS, NTRK1, NTRK2, NTRK3, NUP93, ODC1, OGFR, |
| | PAK3, PALB2, PAX5, PBRM1, PDGFC, PDGFRA, PDGFRB, PDK1, PGP, PGR (PR), |
| | PIK3CA, PIK3CG, PIK3R1, PIK3R2, POLA, PPARG, PPARGC1, PPP2R1A, PRDM1, |
| | PRKAR1A, PRKDC, PTCH1, PTEN, PTPN11, RAD50, RAD51, RAF1, RARA, RB1, RET, |
| | RICTOR, RNF43, ROS1, RPTOR, RRM1, RRM2, RRM2B, RUNX1, RXR, RXRB, RXRG, |
| | SETD2, SF3B1, SMAD2, SMAD4, SMARCA4, SMARCB1, SMO, SOCS1, SOX10, SOX2, |
| | SPARC, SPEN, SPOP, SRC, SST, SSTR1, SSTR2, SSTR3, SSTR4, SSTR5, STAG2, |
| | STAT4, STK11, SUFU, TET2, TGFBR2, TK1, TLE3, TMPRSS2, TNF, TNFAIP3, |
| | TNFRSF14, TOP1, TOP2, TOP2A, TOP2B, TP53, TS, TSC1, TSC2, TSHR, TUBB3, TXN, |
| | TYMP, VDR, VEGF (VEGFA), VEGFC, VHL, WISP3, WT1, XDH, XPO1, YES1, ZAP70, |
| | ZNF217, ZNF703 |
| Cancer Related | 5T4, ABI1, ABL1, ABL2, ACKR3, ACSL3, ACSL6, ACVR1B, ACVR2A, AFF1, AFF3, |
| | AFF4, AKAP9, AKT1, AKT2, AKT3, ALDH2, ALK, AMER1, ANG1/ANGPT1/TM7SF2, |
| | ANG2/ANGPT2/VPS51, APC, AR, ARAF, ARFRP1, ARHGAP26, ARHGEF12, ARID1A, |
| | ARID1B, ARID2, ARNT, ASPSCR1, ASXL1, ATF1, ATIC, ATM, ATP1A1, ATP2B3, |
| | ATR, ATRX, AURKA, AURKB, AXIN1, AXL, BAP1, BARD1, BBC3, BCL10, BCL11A, |
| | BCL11B, BCL2, BCL2L1, BCL2L11, BCL2L2, BCL3, BCL6, BCL7A, BCL9, BCOR, |
| | BCORL1, BCR, BIRC3, BLM, BMPR1A, BRAF, BRCA1, BRCA2, BRD3, BRD4, BRIP1, |
| | BTG1, BTK, BUB1B, c-KIT, C11orf30, c15orf21, C15orf65, C2orf44, CA6, CACNA1D, |
| | CALR, CAMTA1, CANT1, CARD11, CARS, CASC5, CASP8, CBFA2T3, CBFB, CBL, |
| | CBLB, CBLC, CCDC6, CCNB1IP1, CCND1, CCND2, CCND3, CCNE1, CD110, CD123, |
| | CD137, CD19, CD20, CD274, CD27L, CD38, CD4, CD74, CD79A, CD79B, CDC73, |
| | CDH1, CDH11, CDK12, CDK4, CDK6, CDK7, CDK8, CDK9, CDKN1A, CDKN1B, |
| | CDKN2A, CDKN2B, CDKN2C, CDX2, CEBPA, CHCHD7, CHD2, CHD4, CHEK1, |
| | CHEK2, CHIC2, Chk1, CHN1, CIC, CIITA, CLP1, CLTC, CLTCL1, CNBP, CNOT3, |
| | CNTRL, COL1A1, COPB1, CoREST, COX6C, CRAF, CREB1, CREB3L1, CREB3L2, |
| | CREBBP, CRKL, CRLF2, CRTC1, CRTC3, CSF1R, CSF3R, CTCF, CTLA4, CTNNA1, |
| | CTNNB1, CUL3, CXCR4, CYLD, CYP17A1, CYP2D6, DAXX, DDB2, DDIT3, DDR1, |
| | DDR2, DDX10, DDX5, DDX6, DEK, DICER1, DLL-4, DNAPK, DNM2, DNMT3A, |
| | DOT1L, EBF1, ECT2L, EGFR, EIF4A2, ELF4, ELK4, ELL, ELN, EML4, EP300, EPHA3, |
| | EPHA5, EPHA7, EPHA8, EPHB1, EPHB2, EPS15, ERBB2, ERBB3, ERBB4, ERC1, |
| | ERCC1, ERCC2, ERCC3, ERCC4, ERCC5, ERG, ERRFI1, ESR1, ETBR, ETV1, ETV4, |
| | ETV5, ETV6, EWSR1, EXT1, EXT2, EZH2, EZR, FAK, FAM46C, FANCA, FANCC, |
| | FANCD2, FANCE, FANCF, FANCG, FANCL, FAS, FAT1, FBXO11, FBXW7, FCRL4, |
| | FEV, FGF10, FGF14, FGF19, FGF2, FGF23, FGF3, FGF4, FGF6, FGFR1, FGFR1OP, |
| | FGFR2, FGFR3, FGFR4, FH, FHIT, FIP1L1, FKBP12, FLCN, FLI1, FLT1, FLT3, FLT4, |
| | FNBP1, FOXA1, FOXL2, FOXO1, FOXO3, FOXO4, FOXP1, FRS2, FSTL3, FUBP1, FUS, |
| | GABRA6, GAS7, GATA1, GATA2, GATA3, GATA4, GATA6, GID4, GITR, GLI1, GMPS, |
| | GNA11, GNA13, GNAQ, GNAS, GNRH1, GOLGA5, GOPC, GPC3, GPHN, GPR124, |
| | GRIN2A, GRM3, GSK3B, GUCY2C, H3F3A, H3F3B, HCK, HERPUD1, HEY1, HGF, |
| | HIP1, HIST1H3B, HIST1H4I, HLF, HMGA1, HMGA2, HMT, HNF1A, HNRNPA2B1, |
| | HOOK3, HOXA11, HOXA13, HOXA9, HOXC11, HOXC13, HOXD11, HOXD13, HRAS, |
| | HSD3B1, HSP90AA1, HSP90AB1, IAP, IDH1, IDH2, IGF1R, IGF2, IKBKE, IKZF1, IL2, |
| | IL21R, IL6, IL6ST, IL7R, INHBA, INPP4B, IRF2, IRF4, IRS2, ITGAV, ITGB1, ITK, JAK1, |
| | JAK2, JAK3, JAZF1, JUN, KAT6A, KAT6B, KCNJ5, KDM5A, KDM5C, KDM6A, KDR, |
| | KDSR, KEAP1, KEL, KIAA1549, KIF5B, KIR3DL1, KLF4, KLHL6, KLK2, KMT2A, |
| | KMT2C, KMT2D, KRAS, KTN1, LASP1, LCK, LCP1, LGALS3, LGR5, LHFP, LIFR, |
| | LMO1, LMO2, LOXL2, LPP, LRIG3, LRP1B, LSD1, LYL1, LYN, LZTR1, MAF, MAFB, |
| | MAGI2, MALT1, MAML2, MAP2K1, MAP2K2, MAP2K4, MAP3K1, MAPK1, MAPK11, |
| | MAX, MCL1, MDM2, MDM4, MDS2, MECOM, MED12, MEF2B, MEK1, MEK2, MEN1, |
| | MET, MITF, MKL1, MLF1, MLH1, MLLT1, MLLT10, MLLT11, MLLT3, MLLT4, |
| | MLLT6, MMP9, MN1, MNX1, MPL, MPS1, MRE11A, MS4A1, MSH2, MSH6, MSI2, |
| | MSN, MST1R, MTCP1, MTOR, MUC1, MUC16, MUTYH, MYB, MYC, MYCL, MYCN, |
| | MYD88, MYH11, MYH9, NACA, NAE1, NBN, NCKIPSD, NCOA1, NCOA2, NCOA4, |
| | NDRG1, NF1, NF2, NFE2L2, NFIB, NFKB2, NFKBIA, NIN, NKX2-1, NONO, NOTCH1, |
| | NOTCH2, NOTCH3, NPM1, NR4A3, NRAS, NSD1, NT5C2, NTRK1, NTRK2, NTRK3, |
| | NUMA1, NUP214, NUP93, NUP98, NUTM1, NUTM2B, OLIG2, OMD, P2RY8, |
| | PAFAH1B2, PAK3, PALB2, PARK2, PARP1, PATZ1, PAX3, PAX5, PAX7, PAX8, |
| | PBRM1, PBX1, PCM1, PCSK7, PDCD1, PDCD1LG2, PDE4DIP, PDGFB, PDGFRA, |
| | PDGFRB, PDK1, PER1, PHF6, PHOX2B, PICALM, PIK3C2B, PIK3CA, PIK3CB, |
| | PIK3CD, PIK3CG, PIK3R1, PIK3R2, PIM1, PKC, PLAG1, PLCG2, PML, PMS1, PMS2, |
| | POLD1, POLE, POT1, POU2AF1, POU5F1, PPARG, PPP2R1A, PRCC, PRDM1, PRDM16, |
| | PREX2, PRF1, PRKAR1A, PRKCI, PRKDC, PRLR, PRRX1, PRSS8, PSIP1, PTCH1, |
| | PTEN, PTK2, PTPN11, PTPRC, PTPRD, QKI, RABEP1, RAC1, RAD21, RAD50, RAD51, |
| | RAD51B, RAF1, RALGDS, RANBP17, RANBP2, RANKL, RAP1GDS1, RARA, RB1, |
| | RBM10, RBM15, RECQL4, REL, RET, RHOH, RICTOR, RMI2, RNF213, RNF43, ROS1, |
| | RPL10, RPL20, RPL5, RPN1, RPS6KB1, RPTOR, RUNX1, RUNx1T1, SBDS, SDC4, |
| | SDHA, SDHAF2, SDHB, SDHC, SDHD, SEPT5, SEPT6, SEPT9, SET, SETBP1, SETD2, |
| | SF3B1, SFPQ, SH2B3, SH3GL1, SLAMF7, SLC34A2, SLC45A3, SLIT2, SMAD2, |
| | SMAD3, SMAD4, SMARCA4, SMARCB1, SMARCE1, SMO, SNCAIP, SNX29, SOCS1, |
| | SOX10, SOX2, SOX9, SPECC1, SPEN, SPOP, SPTA1, SRC, SRGAP3, SRSF2, SRSF3, |
| | SS18, SS18L1, SSX1, SSX2, SSX4, STAG2, STAT3, STAT4, STAT5B, STEAP1, STIL, |
| | STK11, SUFU, SUZ12, SYK, TAF1, TAF15, TAL1, TAL2, TBL1XR1, TBX3, TCEA1, |
| | TCF12, TCF3, TCF7L2, TCL1A, TERC, TERT, TET1, TET2, TFE3, TFEB, TFG, TFPT, |
| | TFRC, TGFB1, TGFBR2, THRAP3, TIE2, TLX1, TLX3, TMPRSS2, TNFAIP3, |
| | TNFRSF14, TNFRSF17, TOP1, TOP2A, TP53, TPM3, TPM4, TPR, TRAF7, TRIM26, |
| | TRIM27, TRIM33, TRIP11, TRRAP, TSC1, TSC2, TSHR, TTL, U2AF1, UBA1, UBR5, |
| | USP6, VEGFA, VEGFB, VEGFR, VHL, VTI1A, WAS, WEE1, WHSC1, WHSC1L1, WIF1, |
| | WISP3, WNT11, WNT2B, WNT3, WNT3A, WNT4, WNT5A, WNT6, WNT7B, WRN, |
| | WT1, WWTR1, XPA, XPC, XPO1, YWHAE, ZAK, ZBTB16, ZBTB2, ZMYM2, ZNF217, |
| | ZNF331, ZNF384, ZNF521, ZNF703, ZRSR2 |
| Cancer Related | ABL2, ACSL3, ACSL6, AFF1, AFF3, AFF4, AKAP9, AKT3, ALDH2, APC, ARFRP1, |
| | ARHGAP26, ARHGEF12, ARID2, ARNT, ASPSCR1, ASXL1, ATF1, ATIC, ATM, |
| | ATP1A1, ATR, AURKA, AXIN1, AXL, BAP1, BARD1, BCL10, BCL11A, BCL2L11, |
| | BCL3, BCL6, BCL7A, BCL9, BCR, BIRC3, BLM, BMPR1A, BRAF, BRCA1, BRCA2, |
| | BRIP1, BUB1B, C11orf30, C2orf44, CACNA1D, CALR, CAMTA1, CANT1, CARD11, |
| | CARS, CASC5, CASP8, CBFA2T3, CBFB, CBL, CBLB, CCDC6, CCNB1IP1, CCND2, |
| | CD274, CD74, CD79A, CDC73, CDH11, CDKN1B, CDX2, CHEK1, CHEK2, CHIC2, |
| | CHN1, CIC, CIITA, CLP1, CLTC, CLTCL1, CNBP, CNTRL, COPB1, CREB1, CREB3L1, |
| | CREB3L2, CRTC1, CRTC3, CSF1R, CSF3R, CTCF, CTLA4, CTNNA1, CTNNB1, CYLD, |
| | CYP2D6, DAXX, DDR2, DDX10, DDX5, DDX6, DEK, DICER1, DOT1L, EBF1, ECT2L, |
| | ELK4, ELL, EML4, EPHA3, EPHA5, EPHB1, EPS15, ERBB3, ERBB4, ERC1, ERCC2, |
| | ERCC3, ERCC4, ERCC5, ERG, ESR1, ETV1, ETV5, ETV6, EWSR1, EXT1, EXT2, EZR, |
| | FANCA, FANCC, FANCD2, FANCE, FANCG, FANCL, FAS, FBXO11, FBXW7, FCRL4, |
| | FGF14, FGF19, FGF23, FGF6, FGFR1OP, FGFR4, FH, FHIT, FIP1L1, FLCN, FLI1, FLT1, |
| | FLT3, FLT4, FNBP1, FOXA1, FOXO1, FOXP1, FUBP1, FUS, GAS7, GID4, GMPS, |
| | GNA13, GNAQ, GNAS, GOLGA5, GOPC, GPHN, GPR124, GRIN2A, GSK3B, H3F3A, |
| | H3F3B, HERPUD1, HGF, HIP1, HMGA1, HMGA2, HNRNPA2B1, HOOK3, HSP90AA1, |
| | HSP90AB1, IDH1, IDH2, IGF1R, IKZF1, IL2, IL21R, IL6ST, IL7R, IRF4, ITK, JAK1, |
| | JAK2, JAK3, JAZF1, KDM5A, KEAP1, KIAA1549, KIF5B, KIT, KLHL6, KMT2A, |
| | KMT2C, KMT2D, KRAS, KTN1, LCK, LCP1, LGR5, LHFP, LIFR, LPP, LRIG3, LRP1B, |
| | LYL1, MAF, MALT1, MAML2, MAP2K2, MAP2K4, MAP3K1, MDM4, MDS2, MEF2B, |
| | MEN1, MITF, MLF1, MLH1, MLLT1, MLLT10, MLLT3, MLLT4, MLLT6, MNX1, |
| | MRE11A, MSH2, MSH6, MSI2, MTOR, MYB, MYCN, MYD88, MYH11, MYH9, NACA, |
| | NCKIPSD, NCOA1, NCOA2, NCOA4, NF1, NFE2L2, NFIB, NFKB2, NIN, NOTCH2, |
| | NPM1, NR4A3, NSD1, NT5C2, NTRK2, NTRK3, NUP214, NUP93, NUP98, NUTM1, |
| | PALB2, PAX3, PAX5, PAX7, PBRM1, PBX1, PCM1, PCSK7, PDCD1, PDCD1LG2, |
| | PDGFB, PDGFRA, PDGFRB, PDK1, PER1, PICALM, PIK3CA, PIK3R1, PIK3R2, PIM1, |
| | PML, PMS2, POLE, POT1, POU2AF1, PPARG, PRCC, PRDM1, PRDM16, PRKAR1A, |
| | PRRX1, PSIP1, PTCH1, PTEN, PTPN11, PTPRC, RABEP1, RAC1, RAD50, RAD51, |
| | RAD51B, RAF1, RALGDS, RANBP17, RAP1GDS1, RARA, RBM15, REL, RET, RMI2, |
| | RNF43, RPL20, RPL5, RPN1, RPTOR, RUNX1, RUNX1T1, SBDS, SDC4, SDHAF2, |
| | SDHB, SDHC, SDHD, 8-Sep, SET, SETBP1, SETD2, SF3B1, SH2B3, SH3GL1, SLC34A2, |
| | SMAD2, SMAD4, SMARCB1, SMARCE1, SMO, SNX29, SOX10, SPECC1, SPEN, |
| | SRGAP3, SRSF2, SRSF3, SS18, SS18L1, STAT3, STAT4, STAT5B, STIL, STK11, SUFU, |
| | SUZ12, SYK, TAF15, TCF12, TCF3, TCF7L2, TET1, TET2, TFEB, TFG, TFRC, TGFBR2, |
| | TLX1, TNFAIP3, TNFRSF14, TNFRSF17, TP53, TPM3, TPM4, TPR, TRAF7, TRIM26, |
| | TRIM27, TRIM33, TRIP11, TRRAP, TSC1, TSC2, TSHR, TTL, U2AF1, USP6, VEGFA, |
| | VEGFB, VTI1A, WHSC1, WHSC1L1, WIF1, WISP3, WRN, WWTR1, XPA, XPC, XPO1, |
| | YWHAE, ZMYM2, ZNF217, ZNF331, ZNF384, ZNF521, ZNF703 |
| Gene fusions and | AKT3, ALK, ARHGAP26, AXL, BRAF, BRD3/4, EGFR, ERG, ESR1, ETV1/4/5/6, |
| mutations in cancer | EWSR1, FGFR1, FGFR2, FGFR3, FGR, INSR, MAML2, MAST1/2, MET, MSMB, MUSK, |
| | MYB, NOTCH1/2, NRG1, NTRK1/2/3, NUMBL, NUTM1, PDGFRA/B, PIK3CA, PKN1, |
| | PPARG, PRKCA/B, RAF1, RELA, RET, ROS1, RSPO2/3, TERT, TFE3, TFEB, THADA, |
| | TMPRSS2 |
| Gene fusions and | ABL1 fusion to (ETV6, NUP214, RCSD1, RANBP2, SNX2, or ZMIZ1); ABL2 fusion to |
| mutations in cancer | (PAG1 or RCSD1); CSF1R fusion to (SSBP2); PDGFRB fusion to (EBF1, SSBP2, |
| | TNIP1 or ZEB2); CRLF2 fusion to (P2RY8); JAK2 fusion to (ATF7IP, BCR, ETV6, |
| | PAX5, PPFIBP1, SSBP2, STRN3, TERF2, or TPR); EPOR fusion to (IGH or IGK); |
| | IL2RB fusion to (MYH9); NTRK3 fusion to (ETV6); PTK2B fusion to (KDM6A or |
| | STAG2); TSLP fusion to (IQGAP2); TYK2 fusion to (MYB) |
| Cytohesions | cytohesin-1 (CYTH1), cytohesin-2 (CYTH2; ARNO), cytohesin-3 (CYTH3; Grp1; ARNO3), |
| | cytohesin-4 (CYTH4) |
| Cancer/Angio | Erb 2, Erb 3, Erb 4, UNC93a, B7H3, MUC1, MUC2, MUC16, MUC17, 5T4, RAGE, VEGFA, |
| | VEGFR2, FLT1, DLL4, Epcam |
| Tissue (Breast) | BIG H3, GCDFP-15, PR(B), GPR 30, CYFRA 21, BRCA 1, BRCA 2, ESR 1, ESR2 |
| Tissue (Prostate) | PSMA, PCSA, PSCA, PSA, TMPRSS2 |
| Inflammation/Immune | MFG-E8, IFNAR, CD40, CD80, MICB, HLA-DRb, IL-17-Ra |
| Common vesicle | HSPA8, CD63, Actb, GAPDH, CD9, CD81, ANXA2, HSP90AA1, ENO1, YWHAZ, |
| markers | PDCD6IP, CFL1, SDCBP, PKN2, MSN, MFGE8, EZR, YWHAG, PGK1, EEF1A1, PPIA, |
| | GLC1F, GK, ANXA6, ANXA1, ALDOA, ACTG1, TPI1, LAMP2, HSP90AB1, DPP4, |
| | YWHAB, TSG101, PFN1, LDHB, HSPA1B, HSPA1A, GSTP1, GNAI2, GDI2, CLTC, |
| | ANXA5, YWHAQ, TUBA1A, THBS1, PRDX1, LDHA, LAMP1, CLU, CD86 |
| Common vesicle | CD63, GAPDH, CD9, CD81, ANXA2, ENO1, SDCBP, MSN, MFGE8, EZR, GK, ANXA1, |
| membrane markers | LAMP2, DPP4, TSG101, HSPA1A, GDI2, CLTC, LAMP1, CD86, ANPEP, TFRC, |
| | SLC3A2, RDX, RAP1B, RAB5C, RAB5B, MYH9, ICAM1, FN1, RAB11B, PIGR, |
| | LGALS3, ITGB1, EHD1, CLIC1, ATP1A1, ARF1, RAP1A, P4HB, MUC1, KRT10, HLA- |
| | A, FLOT1, CD59, C1orf58, BASP1, TACSTD1, STOM |
| Common vesicle | MHC class I, MHC class II, Integrins, Alpha 4 beta 1, Alpha M beta 2, Beta 2, |
| markers | ICAM1/CD54, P-selection, Dipeptidylpeptidase IV/CD26, Aminopeptidase n/CD13, CD151, |
| | CD53, CD37, CD82, CD81, CD9, CD63, Hsp70, Hsp84/90 |
| | Actin, Actin-binding proteins, Tubulin, Annexin I, Annexin II, Annexin IV, Annexin V, |
| | Annexin VI, RAB7/RAP1B/RADGDI, Gi2alpha/14-3-3, CBL/LCK, CD63, GAPDH, CD9, |
| | CD81, ANXA2, ENO1, SDCBP, MSN, MFGE8, EZR, GK, ANXA1, LAMP2, DPP4, |
| | TSG101, HSPA1A, GDI2, CLTC, LAMP1, Cd86, ANPEP, TFRC, SLC3A2, RDX, RAP1B, |
| | RAB5C, RAB5B, MYH9, ICAM1, FN1, RAB11B, PIGR, LGALS3, ITGB1, EHD1, CLIC1, |
| | ATP1A1, ARF1, RAP1A, P4HB, MUC1, KRT10, HLA-A, FLOT1, CD59, C1orf58, BASP1, |
| | TACSTD1, STOM |
| Vesicle markers | A33, a33 n15, AFP, ALA, ALIX, ALP, AnnexinV, APC, ASCA, ASPH (246-260), ASPH |
| | (666-680), ASPH (A-10), ASPH (D01P), ASPH (D03), ASPH (G-20), ASPH (H-300), |
| | AURKA, AURKB, B7H3, B7H4, BCA-225, BCNP, BDNF, BRCA, CA125 (MUC16), CA- |
| | 19-9, C-Bir, CD1.1, CD10, CD174 (Lewis y), CD24, CD44, CD46, CD59 (MEM-43), CD63, |
| | CD66e CEA, CD73, CD81, CD9, CDA, CDAC1 1a2, CEA, C-Erb2, C-erbB2, CRMP-2, |
| | CRP, CXCL12, CYFRA21-1, DLL4, DR3, EGFR, Epcam, EphA2, EphA2 (H-77), ER, |
| | ErbB4, EZH2, FASL, FRT, FRT c.f23, GDF15, GPCR, GPR30, Gro-alpha, HAP, HBD 1, |
| | HBD2, HER 3 (ErbB3), HSP, HSP70, hVEGFR2, iC3b, IL 6 Unc, IL-1B, IL6 Unc, IL6R, |
| | IL8, IL-8, INSIG-2, KLK2, L1CAM, LAMN, LDH, MACC-1, MAPK4, MART-1, MCP-1, |
| | M-CSF, MFG-E8, MIC1, MIF, MIS RII, MMG, MMP26, MMP7, MMP9, MS4A1, MUC1, |
| | MUC1 seq1, MUC1 seq11A, MUC17, MUC2, Ncam, NGAL, NPGP/NPFF2, OPG, OPN, |
| | p53, p53, PA2G4, PBP, PCSA, PDGFRB, PGP9.5, PIM1, PR (B), PRL, PSA, PSMA, |
| | PSME3, PTEN, R5-CD9 Tube 1, Reg IV, RUNX2, SCRN1, seprase, SERPINB3, SPARC, |
| | SPB, SPDEF, SRVN, STAT 3, STEAP1, TF (FL-295), TFF3, TGM2, TIMP-1, TIMP1, |
| | TIMP2, TMEM211, TMPRSS2, TNF-alpha, Trail-R2, Trail-R4, TrKB, TROP2, Tsg 101, |
| | TWEAK, UNC93A, VEGF A, YPSMA-1 |
| Vesicle markers | NSE, TRIM29, CD63, CD151, ASPH, LAMP2, TSPAN1, SNAIL, CD45, CKS1, NSE, |
| | FSHR, OPN, FTH1, PGP9, ANNEXIN 1, SPD, CD81, EPCAM, PTH1R, CEA, CYTO 7, |
| | CCL2, SPA, KRAS, TWIST1, AURKB, MMP9, P27, MMP1, HLA, HIF, CEACAM, |
| | CENPH, BTUB, INTG b4, EGFR, NACC1, CYTO 18, NAP2, CYTO 19, ANNEXIN V, |
| | TGM2, ERB2, BRCA1, B7H3, SFTPC, PNT, NCAM, MS4A1, P53, INGA3, MUC2, SPA, |
| | OPN, CD63, CD9, MUC1, UNCR3, PAN ADH, HCG, TIMP, PSMA, GPCR, RACK1, |
| | PSCA, VEGF, BMP2, CD81, CRP, PRO GRP, B7H3, MUC1, M2PK, CD9, PCSA, PSMA |
| Vesicle markers | TFF3, MS4A1, EphA2, GAL3, EGFR, N-gal, PCSA, CD63, MUC1, TGM2, CD81, DR3, |
| | MACC-1, TrKB, CD24, TIMP-1, A33, CD66 CEA, PRL, MMP9, MMP7, TMEM211, |
| | SCRN1, TROP2, TWEAK, CDACC1, UNC93A, APC, C-Erb, CD10, BDNF, FRT, GPR30, |
| | P53, SPR, OPN, MUC2, GRO-1, tsg 101, GDF15 |
| Vesicle markers | CD9, Erb2, Erb4, CD81, Erb3, MUC16, CD63, DLL4, HLA-Drpe, B7H3, IFNAR, 5T4, |
| | PCSA, MICB, PSMA, MFG-E8, Muc1, PSA, Muc2, Unc93a, VEGFR2, EpCAM, VEGF A, |
| | TMPRSS2, RAGE, PSCA, CD40, Muc17, IL-17-RA, CD80 |
| Benign Prostate | BCMA, CEACAM-1, HVEM, IL-1 R4, IL-10 Rb, Trappin-2, p53, hsa-miR-329, hsa-miR- |
| Hyperplasia (BPH) | 30a, hsa-miR-335, hsa-miR-152, hsa-miR-151-5p, hsa-miR-200a, hsa-miR-145, hsa-miR- |
| | 29a, hsa-miR-106b, hsa-miR-595, hsa-miR-142-5p, hsa-miR-99a, hsa-miR-20b, hsa-miR- |
| | 373, hsa-miR-502-5p, hsa-miR-29b, hsa-miR-142-3p, hsa-miR-663, hsa-miR-423-5p, hsa- |
| | miR-15a, hsa-miR-888, hsa-miR-361-3p, hsa-miR-365, hsa-miR-10b, hsa-miR-199a-3p, hsa- |
| | miR-181a, hsa-miR-19a, hsa-miR-125b, hsa-miR-760, hsa-miR-7a, hsa-miR-671-5p, hsa- |
| | miR-7c, hsa-miR-1979, hsa-miR-103 |
| Metastatic Prostate | hsa-miR-100, hsa-miR-1236, hsa-miR-1296, hsa-miR-141, hsa-miR-146b-5p, hsa-miR-17*, |
| Cancer | hsa-miR-181a, hsa-miR-200b, hsa-miR-20a*, hsa-miR-23a*, hsa-miR-331-3p, hsa-miR-375, |
| | hsa-miR-452, hsa-miR-572, hsa-miR-574-3p, hsa-miR-577, hsa-miR-582-3p, hsa-miR-937, |
| | miR-10a, miR-134, miR-141, miR-200b, miR-30a, miR-32, miR-375, miR-495, miR-564, |
| | miR-570, miR-574-3p, miR-885-3p |
| Metastatic Prostate | hsa-miR-200b, hsa-miR-375, hsa-miR-141, hsa-miR-331-3p, hsa-miR-181a, hsa-miR-574-3p |
| Cancer | |
| Prostate Cancer | hsa-miR-574-3p, hsa-miR-141, hsa-miR-432, hsa-miR-326, hsa-miR-2110, hsa-miR-181a- |
| | 2*, hsa-miR-107, hsa-miR-301a, hsa-miR-484, hsa-miR-625* |
| Metastatic Prostate | hsa-miR-582-3p, hsa-miR-20a*, hsa-miR-375, hsa-miR-200b, hsa-miR-379, hsa-miR-572, |
| Cancer | hsa-miR-513a-5p, hsa-miR-577, hsa-miR-23a*, hsa-miR-1236, hsa-miR-609, hsa-miR-17*, |
| | hsa-miR-130b, hsa-miR-619, hsa-miR-624*, hsa-miR-198 |
| Metastatic Prostate | FOX01A, SOX9, CLNS1A, PTGDS, XPO1, LETMD1, RAD23B, ABCC3, APC, CHES1, |
| Cancer | EDNRA, FRZB, HSPG2, TMPRSS2_ETV1 fusion |
| Prostate Cancer | hsa-let-7b, hsa-miR-107, hsa-miR-1205, hsa-miR-1270, hsa-miR-130b, hsa-miR-141, hsa- |
| | miR-143, hsa-miR-148b*, hsa-miR-150, hsa-miR-154*, hsa-miR-181a*, hsa-miR-181a-2*, |
| | hsa-miR-18a*, hsa-miR-19b-1*, hsa-miR-204, hsa-miR-2110, hsa-miR-215, hsa-miR-217, |
| | hsa-miR-219-2-3p, hsa-miR-23b*, hsa-miR-299-5p, hsa-miR-301a, hsa-miR-301a, hsa-miR- |
| | 326, hsa-miR-331-3p, hsa-miR-365*, hsa-miR-373*, hsa-miR-424, hsa-miR-424*, hsa-miR- |
| | 432, hsa-miR-450a, hsa-miR-451, hsa-miR-484, hsa-miR-497, hsa-miR-517*, hsa-miR-517a, |
| | hsa-miR-518f, hsa-miR-574-3p, hsa-miR-595, hsa-miR-617, hsa-miR-625*, hsa-miR-628-5p, |
| | hsa-miR-629, hsa-miR-634, hsa-miR-769-5p, hsa-miR-93, hsa-miR-96 |
| Prostate Cancer | CD9, PSMA, PCSA, CD63, CD81, B7H3, IL 6, OPG-13, IL6R, PA2G4, EZH2, RUNX2, |
| | SERPINB3, EpCam |
| Prostate Cancer | A33, a33 n15, AFP, ALA, ALIX, ALP, AnnexinV, APC, ASCA, ASPH (246-260), ASPH |
| | (666-680), ASPH (A-10), ASPH (D01P), ASPH (D03), ASPH (G-20), ASPH (H-300), |
| | AURKA, AURKB, B7H3, B7H4, BCA-225, BCNP, BDNF, BRCA, CA125 (MUC16), CA- |
| | 19-9, C-Bir, CD1.1, CD10, CD174 (Lewis y), CD24, CD44, CD46, CD59 (MEM-43), CD63, |
| | CD66e CEA, CD73, CD81, CD9, CDA, CDAC1 1a2, CEA, C-Erb2, C-erbB2, CRMP-2, |
| | CRP, CXCL12, CYFRA21-1, DLL4, DR3, EGFR, Epcam, EphA2, EphA2 (H-77), ER, |
| | ErbB4, EZH2, FASL, FRT, FRT c.f23, GDF15, GPCR, GPR30, Gro-alpha, HAP, HBD 1, |
| | HBD2, HER 3 (ErbB3), HSP, HSP70, hVEGFR2, iC3b, IL 6 Unc, IL-1B, IL6 Unc, IL6R, |
| | IL8, IL-8, INSIG-2, KLK2, L1CAM, LAMN, LDH, MACC-1, MAPK4, MART-1, MCP-1, |
| | M-CSF, MFG-E8, MIC1, MIF, MIS RII, MMG, MMP26, MMP7, MMP9, MS4A1, MUC1, |
| | MUC1 seq1, MUC1 seq11A, MUC17, MUC2, Ncam, NGAL, NPGP/NPFF2, OPG, OPN, |
| | p53, p53, PA2G4, PBP, PCSA, PDGFRB, PGP9.5, PIM1, PR (B), PRL, PSA, PSMA, |
| | PSME3, PTEN, R5-CD9 Tube 1, Reg IV, RUNX2, SCRN1, seprase, SERPINB3, SPARC, |
| | SPB, SPDEF, SRVN, STAT 3, STEAP1, TF (FL-295), TFF3, TGM2, TIMP-1, TIMP1, |
| | TIMP2, TMEM211, TMPRSS2, TNF-alpha, Trail-R2, Trail-R4, TrKB, TROP2, Tsg 101, |
| | TWEAK, UNC93A, VEGF A, YPSMA-1 |
| Prostate Cancer | 5T4, ACTG1, ADAM10, ADAM15, ALDOA, ANXA2, ANXA6, APOA1, ATP1A1, |
| Vesicle Markers | BASP1, C1orf58, C20orf114, C8B, CAPZA1, CAV1, CD151, CD2AP, CD59, CD9, CD9, |
| | CFL1, CFP, CHMP4B, CLTC, COTL1, CTNND1, CTSB, CTSZ, CYCS, DPP4, EEF1A1, |
| | EHD1, ENO1, F11R, F2, F5, FAM125A, FNBP1L, FOLH1, GAPDH, GLB1, GPX3, |
| | HIST1H1C, HIST1H2AB, HSP90AB1, HSPA1B, HSPA8, IGSF8, ITGB1, ITIH3, JUP, |
| | LDHA, LDHB, LUM, LYZ, MFGE8, MGAM, MMP9, MYH2, MYL6B, NME1, NME2, |
| | PABPC1, PABPC4, PACSIN2, PCBP2, PDCD6IP, PRDX2, PSA, PSMA, PSMA1, PSMA2, |
| | PSMA4, PSMA6, PSMA7, PSMB1, PSMB2, PSMB3, PSMB4, PSMB5, PSMB6, PSMB8, |
| | PTGFRN, RPS27A, SDCBP, SERINC5, SH3GL1, SLC3A2, SMPDL3B, SNX9, TACSTD1, |
| | TCN2, THBS1, TPI1, TSG101, TUBB, VDAC2, VPS37B, YWHAG, YWHAQ, YWHAZ |
| Prostate Cancer | FLNA, DCRN, HER 3 (ErbB3), VCAN, CD9, GAL3, CDADC1, GM-CSF, EGFR, RANK, |
| Vesicle Markers | CSA, PSMA, ChickenIgY, B7H3, PCSA, CD63, CD3, MUC1, TGM2, CD81, S100-A4, |
| | MFG-E8, Integrin, NK-2R(C-21), PSA, CD24, TIMP-1, IL6 Unc, PBP, PIM1, CA-19-9, |
| | Trail-R4, MMP9, PRL, EphA2, TWEAK, NY-ESO-1, Mammaglobin, UNC93A, A33, |
| | AURKB, CD41, XAGE-1, SPDEF, AMACR, seprase/FAP, NGAL, CXCL12, FRT, CD66e |
| | CEA, SIM2 (C-15), C-Bir, STEAP, PSIP1/LEDGF, MUC17, hVEGFR2, ERG, MUC2, |
| | ADAM10, ASPH (A-10), CA125, Gro-alpha, Tsg 101, SSX2, Trail-R4 |
| Prostate Cancer | NT5E (CD73), A33, ABL2, ADAM10, AFP, ALA, ALIX, ALPL, AMACR, Apo J/CLU, |
| Vesicle Markers | ASCA, ASPH (A-10), ASPH (D01P), AURKB, B7H3, B7H4, BCNP, BDNF, CA125 |
| | (MUC16), CA-19-9, C-Bir (Flagellin), CD10, CD151, CD24, CD3, CD41, CD44, CD46, |
| | CD59(MEM-43), CD63, CD66e CEA, CD81, CD9, CDA, CDADC1, C-erbB2, CRMP-2, |
| | CRP, CSA, CXCL12, CXCR3, CYFRA21-1, DCRN, DDX-1, DLL4, EGFR, EpCAM, |
| | EphA2, ERG, EZH2, FASL, FLNA, FRT, GAL3, GATA2, GM-CSF, Gro-alpha, HAP, |
| | HER3 (ErbB3), HSP70, HSPB1, hVEGFR2, iC3b, IL-1B, IL6 R, IL6 Unc, IL7 R |
| | alpha/CD127, IL8, INSIG-2, Integrin, KLK2, Label, LAMN, Mammaglobin, M-CSF, MFG- |
| | E8, MIF, MIS RII, MMP7, MMP9, MS4A1, MUC1, MUC17, MUC2, Ncam, NDUFB7, |
| | NGAL, NK-2R(C-21), NY-ESO-1, p53, PBP, PCSA, PDGFRB, PIM1, PRL, PSA, |
| | PSIP1/LEDGF, PSMA, RAGE, RANK, Reg IV, RUNX2, S100-A4, seprase/FAP, |
| | SERPINB3, SIM2 (C-15), SPARC, SPC, SPDEF, SPP1, SSX2, SSX4, STEAP, STEAP4, |
| | TFF3, TGM2, TIMP-1, TMEM211, Trail-R2, Trail-R4, TrKB (poly), Trop2, Tsg 101, |
| | TWEAK, UNC93A, VCAN, VEGF A, wnt-5a(C-16), XAGE, XAGE-1 |
| Prostate Vesicle | ADAM 9, ADAM10, AGR2, ALDOA, ALIX, ANXA1, ANXA2, ANXA4, ARF6, ATP1A3, |
| Membrane | B7H3, BCHE, BCL2L14 (Bcl G), BCNP1, BDKRB2, BDNFCAV1-Caveolin1, CCR2 (CC |
| | chemokine receptor 2, CD192), CCR5 (CC chemokine receptor 5), CCT2 (TCP1-beta), |
| | CD10, CD151, CD166/ALCAM, CD24, CD283/TLR3, CD41, CD46, CD49d (Integrin alpha |
| | 4, ITGA4), CD63, CD81, CD9, CD90/THY1, CDH1, CDH2, CDKN1A cyclin-dependent |
| | kinase inhibitor (p21), CGA gene (coding for the alpha subunit of glycoprotein hormones), |
| | CLDN3 - Claudin3, COX2 (PTGS2), CSE1L (Cellular Apoptosis Susceptibility), CXCR3, |
| | Cytokeratin 18, Eag1 (KCNH1), EDIL3 (del-1), EDNRB - Endothelial Receptor Type B, |
| | EGFR, EpoR, EZH2 (enhancer of Zeste Homolog2), EZR, FABP5, |
| | Farnesyltransferase/geranylgeranyl diphosphate synthase 1 (GGPS1), Fatty acid synthase |
| | (FASN), FTL (light and heavy), GAL3, GDF15-Growth Differentiation Factor 15, GloI, GM- |
| | CSF, GSTP1, H3F3A, HGF (hepatocyte growth factor), hK2/Kif2a, HSP90AA1, HSPA1A/ |
| | HSP70-1, HSPB1, IGFBP-2, IGFBP-3, IL1alpha, IL-6, IQGAP1, ITGAL (Integrin alpha L |
| | chain), Ki67, KLK1, KLK10, KLK11, KLK12, KLK13, KLK14, KLK15, KLK4, KLK5, |
| | KLK6, KLK7, KLK8, KLK9, Lamp-2, LDH-A, LGALS3BP, LGALS8, MMP 1, MMP 2, |
| | MMP 25, MMP 3, MMP10, MMP-14/MT1-MMP, MMP7, MTA1nAnS, Nav1.7, NKX3-1, |
| | Notch1, NRP1/CD304, PAP (ACPP), PGP, PhIP, PIP3/BPNT1, PKM2, PKP1 |
| | (plakophilin1), PKP3 (plakophilin3), Plasma chromogranin-A (CgA), PRDX2, Prostate |
| | secretory protein (PSP94)/β-Microseminoprotein (MSP)/IGBF, PSAP, PSMA, PSMA1, |
| | PTENPTPN13/PTPL1, RPL19, seprase/FAPSET, SLC3A2/CD98, SRVN, STEAP1, |
| | Syndecan/CD138, TGFB, TGM2, TIMP-1TLR4 (CD284), TLR9 (CD289), TMPRSS1/ |
| | hepsin, TMPRSS2, TNFR1, TNFα, Transferrin receptor/CD71/TRFR, Trop2 (TACSTD2), |
| | TWEAK uPA (urokinase plasminoge activator) degrades extracellular matrix, uPAR (uPA |
| | receptor)/CD87, VEGFR1, VEGFR2 |
| Prostate Vesicle | ADAM 34, ADAM 9, AGR2, ALDOA, ANXA1, ANXA 11, ANXA4, ANXA 7, ANXA2, |
| Markers | ARF6, ATP1A1, ATP1A2, ATP1A3, BCHE, BCL2L14 (Bcl G), BDKRB2, CA215, CAV1- |
| | Caveolin1, CCR2 (CC chemokine receptor 2, CD192), CCR5 (CC chemokine receptor 5), |
| | CCT2 (TCP1-beta), CD166/ALCAM, CD49b (Integrin alpha 2, ITGA4), CD90/THY1, |
| | CDH1, CDH2, CDKN1A cyclin-dependent kinase inhibitor (p21), CGA gene (coding for the |
| | alpha subunit of glycoprotein hormones), CHMP4B, CLDN3 - Claudin3, CLSTN1 |
| | (Calsyntenin-1), COX2 (PTGS2), CSE1L (Cellular Apoptosis Susceptibility), Cytokeratin 18, |
| | Eag1 (KCNH1) (plasma membrane-K+-voltage gated channel), EDIL3 (del-1), EDNRB- |
| | Endothelial Receptor Type B, Endoglin/CD105, ENOX2 - Ecto-NOX disulphide Thiol |
| | exchanger 2, EPCA-2 Early prostate cancer antigen2, EpoR, EZH2 (enhancer of Zeste |
| | Homolog2), EZR, FABP5, Farnesyltransferase/geranylgeranyl diphosphate synthase 1 |
| | (GGPS1), Fatty acid synthase (FASN, plasma membrane protein), FTL (light and heavy), |
| | GDF15-Growth Differentiation Factor 15, GloI, GSTP1, H3F3A, HGF (hepatocyte growth |
| | factor), hK2 (KLK2), HSP90AA1, HSPA1A/HSP70-1, IGFBP-2, IGFBP-3, IL1alpha, IL-6, |
| | IQGAP1, ITGAL (Integrin alpha L chain), Ki67, KLK1, KLK10, KLK11, KLK12, KLK13, |
| | KLK14, KLK15, KLK4, KLK5, KLK6, KLK7, KLK8, KLK9, Lamp-2, LDH-A, |
| | LGALS3BP, LGALS8, MFAP5, MMP 1, MMP 2, MMP 24, MMP 25, MMP 3, MMP10, |
| | MMP-14/MT1-MMP, MTA1, nAnS, Nav1.7, NCAM2 - Neural cell Adhesion molecule 2, |
| | NGEP/D-TMPP/IPCA-5/ANO7, NKX3-1, Notch1, NRP1/CD304, PGP, PAP (ACPP), |
| | PCA3 - Prostate cancer antigen 3, Pdia3/ERp57, PhIP, phosphatidylethanolamine (PE), PIP3, |
| | PKP1 (plakophilin1), PKP3 (plakophilin3), Plasma chromogranin-A (CgA), PRDX2, Prostate |
| | secretory protein (PSP94)/β-Microseminoprotein (MSP)/IGBF, PSAP, PSMA1, PTEN, |
| | PTGFRN, PTPN13/PTPL1, PKM2, RPL19, SCA-1/ATXN1, SERINC5/TPO1, SET, |
| | SLC3A2/CD98, STEAP1, STEAP-3, SRVN, Syndecan/CD138, TGFB, Tissue Polypeptide |
| | Specific antigen TPS, TLR4 (CD284), TLR9 (CD289), TMPRSS1/hepsin, TMPRSS2, |
| | TNFR1, TNFα, CD283/TLR3, Transferrin receptor/CD71/TRFR, uPA (urokinase plasminoge |
| | activator), uPAR (uPA receptor)/CD87, VEGFR1, VEGFR2 |
| Prostate Cancer | hsa-miR-1974, hsa-miR-27b, hsa-miR-103, hsa-miR-146a, hsa-miR-22, hsa-miR-382, hsa- |
| Treatment | miR-23a, hsa-miR-376c, hsa-miR-335, hsa-miR-142-5p, hsa-miR-221, hsa-miR-142-3p, hsa- |
| | miR-151-3p, hsa-miR-21, hsa-miR-16 |
| Prostate Cancer | let-7d, miR-148a, miR-195, miR-25, miR-26b, miR-329, miR-376c, miR-574-3p, miR-888, |
| | miR-9, miR1204, miR-16-2*, miR-497, miR-588, miR-614, miR-765, miR92b*, miR-938, |
| | let-7f-2*, miR-300, miR-523, miR-525-5p, miR-1182, miR-1244, miR-520d-3p, miR-379, |
| | let-7b, miR-125a-3p, miR-1296, miR-134, miR-149, miR-150, miR-187, miR-32, miR-324- |
| | 3p, miR-324-5p, miR-342-3p, miR-378, miR-378*, miR-384, miR-451, miR-455-3p, miR- |
| | 485-3p, miR-487a, miR-490-3p, miR-502-5p, miR-548a-5p, miR-550, miR-562, miR-593, |
| | miR-593*, miR-595, miR-602, miR-603, miR-654-5p, miR-877*, miR-886-5p, miR-125a-5p, |
| | miR-140-3p, miR-192, miR-196a, miR-2110, miR-212, miR-222, miR-224*, miR-30b*, |
| | miR-499-3p, miR-505* |
| Prostate (PCSA + | miR-182, miR-663, miR-155, mirR-125a-5p, miR-548a-5p, miR-628-5p, miR-517*, miR- |
| cMVs) | 450a, miR-920, hsa-miR-619, miR-1913, miR-224*, miR-502-5p, miR-888, miR-376a, miR- |
| | 542-5p, miR-30b*, miR-1179 |
| Prostate Cancer | miR-183-96-182 cluster (miRs-183, 96 and 182), metal ion transporter such as hZIP1, |
| | SLC39A1, SLC39A2, SLC39A3, SLC39A4, SLC39A5, SLC39A6, SLC39A7, SLC39A8, |
| | SLC39A9, SLC39A10, SLC39A11, SLC39A12, SLC39A13, SLC39A14 |
| Prostate Cancer | RAD23B, FBP1, TNFRSF1A, CCNG2, NOTCH3, ETV1, BID, SIM2, LETMD1, ANXA1, |
| | miR-519d, miR-647 |
| Prostate Cancer | RAD23B, FBP1, TNFRSF1A, NOTCH3, ETV1, BID, SIM2, ANXA1, BCL2 |
| Prostate Cancer | ANPEP, ABL1, PSCA, EFNA1, HSPB1, INMT, TRIP13 |
| Prostate Cancer | E2F3, c-met, pRB, EZH2, e-cad, CAXII, CAIX, HIF-1α, Jagged, PIM-1, hepsin, RECK, |
| | Clusterin, MMP9, MTSP-1, MMP24, MMP15, IGFBP-2, IGFBP-3, E2F4, caveolin, EF-1A, |
| | Kallikrein 2, Kallikrein 3, PSGR |
| Prostate Cancer | A2ML1, BAX, C10orf47, C1orf162, CSDA, EIFC3, ETFB, GABARAPL2, GUK1, GZMH, |
| | HIST1H3B, HLA-A, HSP90AA1, NRGN, PRDX5, PTMA, RABAC1, RABAGAP1L, |
| | RPL22, SAP18, SEPW1, SOX1 |
| Prostate Cancer | NY-ESO-1, SSX-2, SSX-4, XAGE-lb, AMACR, p90 autoantigen, LEDGF |
| Prostate Cancer | A33, ABL2, ADAM10, AFP, ALA, ALIX, ALPL, ApoJ/CLU, ASCA, ASPH(A-10), |
| | ASPH(D01P), AURKB, B7H3, B7H3, B7H4, BCNP, BDNF, CA125(MUC16), CA-19-9, C- |
| | Bir, CD10, CD151, CD24, CD41, CD44, CD46, CD59(MEM-43), CD63, CD63, |
| | CD66eCEA, CD81, CD81, CD9, CD9, CDA, CDADC1, CRMP-2, CRP, CXCL12, CXCR3, |
| | CYFRA21-1, DDX-1, DLL4, DLL4, EGFR, Epcam, EphA2, ErbB2, ERG, EZH2, FASL, |
| | FLNA, FRT, GAL3, GATA2, GM-CSF, Gro-alpha, HAP, HER3(ErbB3), HSP70, HSPB1, |
| | hVEGFR2, iC3b, IL-1B, IL6R, IL6Unc, IL7Ralpha/CD127, IL8, INSIG-2, Integrin, KLK2, |
| | LAMN, Mammoglobin, M-CSF, MFG-E8, MIF, MISRII, MMP7, MMP9, MUC1, Muc1, |
| | MUC17, MUC2, Ncam, NDUFB7, NGAL, NK-2R(C-21), NT5E (CD73), p53, PBP, PCSA, |
| | PCSA, PDGFRB, PIM1, PRL, PSA, PSA, PSMA, PSMA, RAGE, RANK, RegIV, RUNX2, |
| | S100-A4, seprase/FAP, SERPINB3, SIM2(C-15), SPARC, SPC, SPDEF, SPP1, STEAP, |
| | STEAP4, TFF3, TGM2, TIMP-1, TMEM211, Trail-R2, Trail-R4, TrKB(poly), Trop2, |
| | Tsg101, TWEAK, UNC93A, VEGFA, wnt-5a(C-16) |
| Prostate Vesicles | CD9, CD63, CD81, PCSA, MUC2, MFG-E8 |
| Prostate Cancer | miR-148a, miR-329, miR-9, miR-378*, miR-25, miR-614, miR-518c*, miR-378, miR-765, |
| | let-7f-2*, miR-574-3p, miR-497, miR-32, miR-379, miR-520g, miR-542-5p, miR-342-3p, |
| | miR-1206, miR-663, miR-222 |
| Prostate Cancer | hsa-miR-877*, hsa-miR-593, hsa-miR-595, hsa-miR-300, hsa-miR-324-5p, hsa-miR-548a- |
| | 5p, hsa-miR-329, hsa-miR-550, hsa-miR-886-5p, hsa-miR-603, hsa-miR-490-3p, hsa-miR- |
| | 938, hsa-miR-149, hsa-miR-150, hsa-miR-1296, hsa-miR-384, hsa-miR-487a, hsa-miRPlus- |
| | C1089, hsa-miR-485-3p, hsa-miR-525-5p |
| Prostate Cancer | hsa-miR-451, hsa-miR-223, hsa-miR-593*, hsa-miR-1974, hsa-miR-486-5p, hsa-miR-19b, |
| | hsa-miR-320b, hsa-miR-92a, hsa-miR-21, hsa-miR-675*, hsa-miR-16, hsa-miR-876-5p, hsa- |
| | miR-144, hsa-miR-126, hsa-miR-137, hsa-miR-1913, hsa-miR-29b-1*, hsa-miR-15a, hsa- |
| | miR-93, hsa-miR-1266 |
| Inflammatory | miR-588, miR-1258, miR-16-2*, miR-938, miR-526b, miR-92b*, let-7d, miR-378*, miR- |
| Disease | 124, miR-376c, miR-26b, miR-1204, miR-574-3p, miR-195, miR-499-3p, miR-2110, miR- |
| | 888 |
| Prostate Cancer | A33, ADAM10, AMACR, ASPH (A-10), AURKB, B7H3, CA125, CA-19-9, C-Bir, CD24, |
| | CD3, CD41, CD63, CD66e CEA, CD81, CD9, CDADC1, CSA, CXCL12, DCRN, EGFR, |
| | EphA2, ERG, FLNA, FRT, GAL3, GM-CSF, Gro-alpha, HER 3 (ErbB3), hVEGFR2, IL6 |
| | Unc, Integrin, Mammaglobin, MFG-E8, MMP9, MUC1, MUC17, MUC2, NGAL, NK-2R(C- |
| | 21), NY-ESO-1, PBP, PCSA, PIM1, PRL, PSA, PSIP1/LEDGF, PSMA, RANK, S100-A4, |
| | seprase/FAP, SIM2 (C-15), SPDEF, SSX2, STEAP, TGM2, TIMP-1, Trail-R4, Tsg 101, |
| | TWEAK, UNC93A, VCAN, XAGE-1 |
| Prostate Cancer | A33, ADAM10, ALIX, AMACR, ASCA, ASPH (A-10), AURKB, B7H3, BCNP, CA125, |
| | CA-19-9, C-Bir (Flagellin), CD24, CD3, CD41, CD63, CD66e CEA, CD81, CD9, CDADC1, |
| | CRP, CSA, CXCL12, CYFRA21-1, DCRN, EGFR, EpCAM, EphA2, ERG, FLNA, GAL3, |
| | GATA2, GM-CSF, Gro alpha, HER3 (ErbB3), HSP70, hVEGFR2, iC3b, IL-1B, IL6 Unc, |
| | IL8, Integrin, KLK2, Mammaglobin, MFG-E8, MMP7, MMP9, MS4A1, MUC1, MUC17, |
| | MUC2, NGAL, NK-2R(C-21), NY-ESO-1, p53, PBP, PCSA, PIM1, PRL, PSA, PSMA, |
| | RANK, RUNX2, S100-A4, seprase/FAP, SERPINB3, SIM2 (C-15), SPC, SPDEF, SSX2, |
| | SSX4, STEAP, TGM2, TIMP-1, TRAIL R2, Trail-R4, Tsg 101, TWEAK, VCAN, VEGF A, |
| | XAGE |
| Prostate Vesicles | EpCam, CD81, PCSA, MUC2, MFG-E8 |
| Prostate Vesicles | CD9, CD63, CD81, MMP7, EpCAM |
| Prostate Cancer | let-7d, miR-148a, miR-195, miR-25, miR-26b, miR-329, miR-376c, miR-574-3p, miR-888, |
| | miR-9, miR1204, miR-16-2*, miR-497, miR-588, miR-614, miR-765, miR92b*, miR-938, |
| | let-7f-2*, miR-300, miR-523, miR-525-5p, miR-1182, miR-1244, miR-520d-3p, miR-379, |
| | let-7b, miR-125a-3p, miR-1296, miR-134, miR-149, miR-150, miR-187, miR-32, miR-324- |
| | 3p, miR-324-5p, miR-342-3p, miR-378, miR-378*, miR-384, miR-451, miR-455-3p, miR- |
| | 485-3p, miR-487a, miR-490-3p, miR-502-5p, miR-548a-5p, miR-550, miR-562, miR-593, |
| | miR-593*, miR-595, miR-602, miR-603, miR-654-5p, miR-877*, miR-886-5p, miR-125a-5p, |
| | miR-140-3p, miR-192, miR-196a, miR-2110, miR-212, miR-222, miR-224*, miR-30b*, |
| | miR-499-3p, miR-505* |
| Prostate Cancer | STAT3, EZH2, p53, MACC1, SPDEF, RUNX2, YB-1, AURKA, AURKB |
| Prostate Cancer | E.001036, E.001497, E.001561, E.002330, E.003402, E.003756, E.004838, E.005471, |
| (Ensembl ENSG | E.005882, E.005893, E.006210, E.006453, E.006625, E.006695, E.006756, E.007264, |
| identifiers) | E.007952, E.008118, E.008196, E.009694, E.009830, E.010244, E.010256, E.010278, |
| | E.010539, E.010810, E.011052, E.011114, E.011143, E.011304, E.011451, E.012061, |
| | E.012779, E.014216, E.014257, E.015133, E.015171, E.015479, E.015676, E.016402, |
| | E.018189, E.018699, E.020922, E.022976, E.023909, E.026508, E.026559, E.029363, |
| | E.029725, E.030582, E.033030, E.035141, E.036257, E.036448, E.038002, E.039068, |
| | E.039560, E.041353, E.044115, E.047410, E.047597, E.048544, E.048828, E.049239, |
| | E.049246, E.049883, E.051596, E.051620, E.052795, E.053108, E.054118, E.054938, |
| | E.056097, E.057252, E.057608, E.058729, E.059122, E.059378, E.059691, E.060339, |
| | E.060688, E.061794, E.061918, E.062485, E.063241, E.063244, E.064201, E.064489, |
| | E.064655, E.064886, E.065054, E.065057, E.065308, E.065427, E.065457, E.065485, |
| | E.065526, E.065548, E.065978, E.066455, E.066557, E.067248, E.067369, E.067704, |
| | E.068724, E.068885, E.069535, E.069712, E.069849, E.069869, E.069956, E.070501, |
| | E.070785, E.070814, E.071246, E.071626, E.071859, E.072042, E.072071, E.072110, |
| | E.072506, E.073050, E.073350, E.073584, E.073756, E.074047, E.074071, E.074964, |
| | E.075131, E.075239, E.075624, E.075651, E.075711, E.075856, E.075886, E.076043, |
| | E.076248, E.076554, E.076864, E.077097, E.077147, E.077312, E.077514, E.077522, |
| | E.078269, E.078295, E.078808, E.078902, E.079246, E.079313, E.079785, E.080572, |
| | E.080823, E.081087, E.081138, E.081181, E.081721, E.081842, E.082212, E.082258, |
| | E.082556, E.083093, E.083720, E.084234, E.084463, E.085224, E.085733, E.086062, |
| | E.086205, E.086717, E.087087, E.087301, E.088888, E.088899, E.088930, E.088992, |
| | E.089048, E.089127, E.089154, E.089177, E.089248, E.089280, E.089902, E.090013, |
| | E.090060, E.090565, E.090612, E.090615, E.090674, E.090861, E.090889, E.091140, |
| | E.091483, E.091542, E.091732, E.092020, E.092199, E.092421, E.092621, E.092820, |
| | E.092871, E.092978, E.093010, E.094755, E.095139, E.095380, E.095485, E.095627, |
| | E.096060, E.096384, E.099331, E.099715, E.099783, E.099785, E.099800, E.099821, |
| | E.099899, E.099917, E.099956, E.100023, E.100056, E.100065, E.100084, E.100142, |
| | E.100191, E.100216, E.100242, E.100271, E.100284, E.100299, E.100311, E.100348, |
| | E.100359, E.100393, E.100399, E.100401, E.100412, E.100442, E.100575, E.100577, |
| | E.100583, E.100601, E.100603, E.100612, E.100632, E.100714, E.100739, E.100796, |
| | E.100802, E.100815, E.100823, E.100836, E.100883, E.101057, E.101126, E.101152, |
| | E.101222, E.101246, E.101265, E.101365, E.101439, E.101557, E.101639, E.101654, |
| | E.101811, E.101812, E.101901, E.102030, E.102054, E.102103, E.102158, E.102174, |
| | E.102241, E.102290, E.102316, E.102362, E.102384, E.102710, E.102780, E.102904, |
| | E.103035, E.103067, E.103175, E.103194, E.103449, E.103479, E.103591, E.103599, |
| | E.103855, E.103978, E.104064, E.104067, E.104131, E.104164, E.104177, E.104228, |
| | E.104331, E.104365, E.104419, E.104442, E.104611, E.104626, E.104723, E.104760, |
| | E.104805, E.104812, E.104823, E.104824, E.105127, E.105220, E.105221, E.105281, |
| | E.105379, E.105402, E.105404, E.105409, E.105419, E.105428, E.105486, E.105514, |
| | E.105518, E.105618, E.105705, E.105723, E.105939, E.105948, E.106049, E.106078, |
| | E.106128, E.106153, E.106346, E.106392, E.106554, E.106565, E.106603, E.106633, |
| | E.107104, E.107164, E.107404, E.107485, E.107551, E.107581, E.107623, E.107798, |
| | E.107816, E.107833, E.107890, E.107897, E.107968, E.108296, E.108312, E.108375, |
| | E.108387, E.108405, E.108417, E.108465, E.108561, E.108582, E.108639, E.108641, |
| | E.108848, E.108883, E.108953, E.109062, E.109184, E.109572, E.109625, E.109758, |
| | E.109790, E.109814, E.109846, E.109956, E.110063, E.110066, E.110104, E.110107, |
| | E.110321, E.110328, E.110921, E.110955, E.111057, E.111218, E.111261, E.111335, |
| | E.111540, E.111605, E.111647, E.111785, E.111790, E.111801, E.111907, E.112039, |
| | E.112081, E.112096, E.112110, E.112144, E.112232, E.112234, E.112473, E.112578, |
| | E.112584, E.112715, E.112941, E.113013, E.113163, E.113282, E.113368, E.113441, |
| | E.113448, E.113522, E.113580, E.113645, E.113719, E.113739, E.113790, E.114054, |
| | E.114127, E.114302, E.114331, E.114388, E.114491, E.114861, E.114867, E.115053, |
| | E.115221, E.115234, E.115239, E.115241, E.115257, E.115339, E.115540, E.115541, |
| | E.115561, E.115604, E.115648, E.115738, E.115758, E.116044, E.116096, E.116127, |
| | E.116254, E.116288, E.116455, E.116478, E.116604, E.116649, E.116726, E.116754, |
| | E.116833, E.117298, E.117308, E.117335, E.117362, E.117411, E.117425, E.117448, |
| | E.117480, E.117592, E.117593, E.117614, E.117676, E.117713, E.117748, E.117751, |
| | E.117877, E.118181, E.118197, E.118260, E.118292, E.118513, E.118523, E.118640, |
| | E.118898, E.119121, E.119138, E.119318, E.119321, E.119335, E.119383, E.119421, |
| | E.119636, E.119681, E.119711, E.119820, E.119888, E.119906, E.120159, E.120328, |
| | E.120337, E.120370, E.120656, E.120733, E.120837, E.120868, E.120915, E.120948, |
| | E.121022, E.121057, E.121068, E.121104, E.121390, E.121671, E.121690, E.121749, |
| | E.121774, E.121879, E.121892, E.121903, E.121940, E.121957, E.122025, E.122033, |
| | E.122126, E.122507, E.122566, E.122705, E.122733, E.122870, E.122884, E.122952, |
| | E.123066, E.123080, E.123143, E.123154, E.123178, E.123416, E.123427, E.123595, |
| | E.123901, E.123908, E.123983, E.123992, E.124143, E.124164, E.124181, E.124193, |
| | E.124216, E.124232, E.124529, E.124562, E.124570, E.124693, E.124749, E.124767, |
| | E.124788, E.124795, E.124831, E.124942, E.125246, E.125257, E.125304, E.125352, |
| | E.125375, E.125445, E.125492, E.125676, E.125753, E.125798, E.125844, E.125868, |
| | E.125901, E.125944, E.125995, E.126062, E.126267, E.126653, E.126773, E.126777, |
| | E.126814, E.126858, E.126883, E.126934, E.126945, E.126952, E.127022, E.127328, |
| | E.127329, E.127399, E.127415, E.127554, E.127616, E.127720, E.127824, E.127884, |
| | E.127914, E.127946, E.127948, E.128050, E.128311, E.128342, E.128609, E.128626, |
| | E.128683, E.128708, E.128881, E.129315, E.129351, E.129355, E.129514, E.129636, |
| | E.129657, E.129757, E.129810, E.129990, E.130175, E.130177, E.130193, E.130255, |
| | E.130299, E.130305, E.130338, E.130340, E.130402, E.130413, E.130612, E.130713, |
| | E.130764, E.130770, E.130810, E.130826, E.130935, E.131351, E.131467, E.131473, |
| | E.131771, E.131773, E.132002, E.132275, E.132323, E.132382, E.132475, E.132481, |
| | E.132589, E.132646, E.132716, E.132881, E.133313, E.133315, E.133687, E.133835, |
| | E.133863, E.133874, E.133961, E.134077, E.134138, E.134207, E.134248, E.134308, |
| | E.134444, E.134452, E.134548, E.134684, E.134759, E.134809, E.134851, E.134955, |
| | E.135052, E.135297, E.135298, E.135387, E.135390, E.135476, E.135486, E.135525, |
| | E.135597, E.135679, E.135740, E.135829, E.135842, E.135870, E.135900, E.135914, |
| | E.135926, E.135940, E.135999, E.136044, E.136068, E.136152, E.136169, E.136280, |
| | E.136371, E.136383, E.136450, E.136521, E.136527, E.136574, E.136710, E.136750, |
| | E.136807, E.136874, E.136875, E.136930, E.136933, E.136935, E.137055, E.137124, |
| | E.137312, E.137409, E.137497, E.137513, E.137558, E.137601, E.137727, E.137776, |
| | E.137806, E.137814, E.137815, E.137948, E.137955, E.138028, E.138031, E.138041, |
| | E.138050, E.138061, E.138069, E.138073, E.138095, E.138160, E.138294, E.138347, |
| | E.138363, E.138385, E.138587, E.138594, E.138621, E.138674, E.138756, E.138757, |
| | E.138760, E.138772, E.138796, E.139211, E.139405, E.139428, E.139517, E.139613, |
| | E.139626, E.139684, E.139697, E.139874, E.140263, E.140265, E.140326, E.140350, |
| | E.140374, E.140382, E.140451, E.140481, E.140497, E.140632, E.140678, E.140694, |
| | E.140743, E.140932, E.141002, E.141012, E.141258, E.141378, E.141425, E.141429, |
| | E.141522, E.141543, E.141639, E.141744, E.141873, E.141994, E.142025, E.142208, |
| | E.142515, E.142606, E.142698, E.142765, E.142864, E.142875, E.143013, E.143294, |
| | E.143321, E.143353, E.143374, E.143375, E.143390, E.143578, E.143614, E.143621, |
| | E.143633, E.143771, E.143797, E.143816, E.143889, E.143924, E.143933, E.143947, |
| | E.144136, E.144224, E.144306, E.144381, E.144410, E.144485, E.144566, E.144671, |
| | E.144741, E.144935, E.145020, E.145632, E.145741, E.145833, E.145888, E.145907, |
| | E.145908, E.145919, E.145990, E.146067, E.146070, E.146281, E.146433, E.146457, |
| | E.146535, E.146701, E.146856, E.146966, E.147044, E.147127, E.147130, E.147133, |
| | E.147140, E.147231, E.147257, E.147403, E.147475, E.147548, E.147697, E.147724, |
| | E.148158, E.148396, E.148488, E.148672, E.148737, E.148835, E.149182, E.149218, |
| | E.149311, E.149480, E.149548, E.149646, E.150051, E.150593, E.150961, E.150991, |
| | E.151092, E.151093, E.151247, E.151304, E.151491, E.151690, E.151715, E.151726, |
| | E.151779, E.151806, E.152086, E.152207, E.152234, E.152291, E.152359, E.152377, |
| | E.152409, E.152422, E.152582, E.152763, E.152818, E.152942, E.153113, E.153140, |
| | E.153391, E.153904, E.153936, E.154099, E.154127, E.154380, E.154639, E.154723, |
| | E.154781, E.154832, E.154864, E.154889, E.154957, E.155368, E.155380, E.155508, |
| | E.155660, E.155714, E.155959, E.155980, E.156006, E.156194, E.156282, E.156304, |
| | E.156467, E.156515, E.156603, E.156650, E.156735, E.156976, E.157064, E.157103, |
| | E.157502, E.157510, E.157538, E.157551, E.157637, E.157764, E.157827, E.157992, |
| | E.158042, E.158290, E.158321, E.158485, E.158545, E.158604, E.158669, E.158715, |
| | E.158747, E.158813, E.158863, E.158901, E.158941, E.158987, E.159147, E.159184, |
| | E.159348, E.159363, E.159387, E.159423, E.159658, E.159692, E.159761, E.159921, |
| | E.160049, E.160226, E.160285, E.160294, E.160633, E.160685, E.160691, E.160789, |
| | E.160862, E.160867, E.160948, E.160972, E.161202, E.161267, E.161649, E.161692, |
| | E.161714, E.161813, E.161939, E.162069, E.162298, E.162385, E.162437, E.162490, |
| | E.162613, E.162641, E.162694, E.162910, E.162975, E.163041, E.163064, E.163110, |
| | E.163257, E.163468, E.163492, E.163530, E.163576, E.163629, E.163644, E.163749, |
| | E.163755, E.163781, E.163825, E.163913, E.163923, E.163930, E.163932, E.164045, |
| | E.164051, E.164053, E.164163, E.164244, E.164270, E.164300, E.164309, E.164442, |
| | E.164488, E.164520, E.164597, E.164749, E.164754, E.164828, E.164916, E.164919, |
| | E.164924, E.165084, E.165119, E.165138, E.165215, E.165259, E.165264, E.165280, |
| | E.165359, E.165410, E.165496, E.165637, E.165646, E.165661, E.165688, E.165695, |
| | E.165699, E.165792, E.165807, E.165813, E.165898, E.165923, E.165934, E.166263, |
| | E.166266, E.166329, E.166337, E.166341, E.166484, E.166526, E.166596, E.166598, |
| | E.166710, E.166747, E.166833, E.166860, E.166946, E.166971, E.167004, E.167085, |
| | E.167110, E.167113, E.167258, E.167513, E.167552, E.167553, E.167604, E.167635, |
| | E.167642, E.167658, E.167699, E.167744, E.167751, E.167766, E.167772, E.167799, |
| | E.167815, E.167969, E.167978, E.167987, E.167996, E.168014, E.168036, E.168066, |
| | E.168071, E.168148, E.168298, E.168393, E.168575, E.168653, E.168746, E.168763, |
| | E.168769, E.168803, E.168916, E.169087, E.169093, E.169122, E.169189, E.169213, |
| | E.169242, E.169410, E.169418, E.169562, E.169592, E.169612, E.169710, E.169763, |
| | E.169789, E.169807, E.169826, E.169957, E.170017, E.170027, E.170037, E.170088, |
| | E.170144, E.170275, E.170310, E.170315, E.170348, E.170374, E.170381, E.170396, |
| | E.170421, E.170430, E.170445, E.170549, E.170632, E.170703, E.170743, E.170837, |
| | E.170854, E.170906, E.170927, E.170954, E.170959, E.171121, E.171155, E.171180, |
| | E.171202, E.171262, E.171302, E.171345, E.171428, E.171488, E.171490, E.171492, |
| | E.171540, E.171643, E.171680, E.171723, E.171793, E.171861, E.171953, E.172115, |
| | E.172283, E.172345, E.172346, E.172466, E.172590, E.172594, E.172653, E.172717, |
| | E.172725, E.172733, E.172831, E.172867, E.172893, E.172939, E.173039, E.173230, |
| | E.173366, E.173473, E.173540, E.173585, E.173599, E.173714, E.173726, E.173805, |
| | E.173809, E.173826, E.173889, E.173898, E.173905, E.174021, E.174100, E.174332, |
| | E.174842, E.174996, E.175063, E.175110, E.175166, E.175175, E.175182, E.175198, |
| | E.175203, E.175216, E.175220, E.175334, E.175416, E.175602, E.175866, E.175946, |
| | E.176102, E.176105, E.176155, E.176171, E.176371, E.176515, E.176900, E.176971, |
| | E.176978, E.176994, E.177156, E.177239, E.177354, E.177409, E.177425, E.177459, |
| | E.177542, E.177548, E.177565, E.177595, E.177628, E.177674, E.177679, E.177694, |
| | E.177697, E.177731, E.177752, E.177951, E.178026, E.178078, E.178104, E.178163, |
| | E.178175, E.178187, E.178234, E.178381, E.178473, E.178741, E.178828, E.178950, |
| | E.179091, E.179115, E.179119, E.179348, E.179388, E.179776, E.179796, E.179869, |
| | E.179912, E.179981, E.180035, E.180198, E.180287, E.180318, E.180667, E.180869, |
| | E.180979, E.180998, E.181072, E.181163, E.181222, E.181234, E.181513, E.181523, |
| | E.181610, E.181773, E.181873, E.181885, E.181924, E.182013, E.182054, E.182217, |
| | E.182271, E.182318, E.182319, E.182512, E.182732, E.182795, E.182872, E.182890, |
| | E.182944, E.183048, E.183092, E.183098, E.183128, E.183207, E.183292, E.183431, |
| | E.183520, E.183684, E.183723, E.183785, E.183831, E.183856, E.184007, E.184047, |
| | E.184113, E.184156, E.184254, E.184363, E.184378, E.184470, E.184481, E.184508, |
| | E.184634, E.184661, E.184697, E.184708, E.184735, E.184840, E.184916, E.185043, |
| | E.185049, E.185122, E.185219, E.185359, E.185499, E.185554, E.185591, E.185619, |
| | E.185736, E.185860, E.185896, E.185945, E.185972, E.186198, E.186205, E.186376, |
| | E.186472, E.186575, E.186591, E.186660, E.186814, E.186834, E.186868, E.186889, |
| | E.187097, E.187323, E.187492, E.187634, E.187764, E.187792, E.187823, E.187837, |
| | E.187840, E.188021, E.188171, E.188186, E.188739, E.188771, E.188846, E.189060, |
| | E.189091, E.189143, E.189144, E.189221, E.189283, E.196236, E.196419, E.196436, |
| | E.196497, E.196504, E.196526, E.196591, E.196700, E.196743, E.196796, E.196812, |
| | E.196872, E.196975, E.196993, E.197081, E.197157, E.197217, E.197223, E.197299, |
| | E.197323, E.197353, E.197451, E.197479, E.197746, E.197779, E.197813, E.197837, |
| | E.197857, E.197872, E.197969, E.197976, E.198001, E.198033, E.198040, E.198087, |
| | E.198131, E.198156, E.198168, E.198205, E.198216, E.198231, E.198265, E.198366, |
| | E.198431, E.198455, E.198563, E.198586, E.198589, E.198712, E.198721, E.198732, |
| | E.198783, E.198793, E.198804, E.198807, E.198824, E.198841, E.198951, E.203301, |
| | E.203795, E.203813, E.203837, E.203879, E.203908, E.204231, E.204316, E.204389, |
| | E.204406, E.204560, E.204574 |
| Prostate Markers | E.005893 (LAMP2), E.006756 (ARSD), E.010539 (ZNF200), E.014257 (ACPP), E.015133 |
| (Ensembl ENSG | (CCDC88C), E.018699 (TTC27), E.044115 (CTNNA1), E.048828 (FAM120A), E.051620 |
| identifiers) | (HEBP2), E.056097 (ZFR), E.060339 (CCAR1), E.063241 (ISOC2), E.064489 (MEF2BNB- |
| | MEF2B), E.064886 (CHI3L2), E.066455 (GOLGA5), E.069535 (MAOB), E.072042 |
| | (RDH11), E.072071 (LPHN1), E.074047 (GLI2), E.076248 (UNG), E.076554 (TPD52), |
| | E.077147 (TM9SF3), E.077312 (SNRPA), E.081842 (PCDHA6), E.086717 (PPEF1), |
| | E.088888 (MAVS), E.088930 (XRN2), E.089902 (RCOR1), E.090612 (ZNF268), E.092199 |
| | (HNRNPC), E.095380 (NANS), E.099783 (HNRNPM), E.100191 (SLC5A4), E.100216 |
| | (TOMM22), E.100242 (SUN2), E.100284 (TOM1), E.100401 (RANGAP1), E.100412 |
| | (ACO2), E.100836 (PABPN1), E.102054 (RBBP7), E.102103 (PQBP1), E.103599 (IQCH), |
| | E.103978 (TMEM87A), E.104177 (MYEF2), E.104228 (TRIM35), E.105428 (ZNRF4), |
| | E.105518 (TMEM205), E.106603 (C7orf44; COA1), E.108405 (P2RX1), E.111057 |
| | (KRT18), E.111218 (PRMT8), E.112081 (SRSF3), E.112144 (ICK), E.113013 (HSPA9), |
| | E.113368 (LMNB1), E.115221 (ITGB6), E.116096 (SPR), E.116754 (SRSF11), E.118197 |
| | (DDX59), E.118898 (PPL), E.119121 (TRPM6), E.119711 (ALDH6A1), E.120656 (TAF12), |
| | E.121671 (CRY2), E.121774 (KHDRBS1), E.122126 (OCRL), E.122566 (HNRNPA2B1), |
| | E.123901 (GPR83), E.124562 (SNRPC), E.124788 (ATXN1), E.124795 (DEK), E.125246 |
| | (CLYBL), E.126883 (NUP214), E.127616 (SMARCA4), E.127884 (ECHS1), E.128050 |
| | (PAICS), E.129351 (ILF3), E.129757 (CDKN1C), E.130338 (TULP4), E.130612 |
| | (CYP2G1P), E.131351 (HAUS8), E.131467 (PSME3), E.133315 (MACROD1), E.134452 |
| | (FBXO18), E.134851 (TMEM165), E.135940 (COX5B), E.136169 (SETDB2), E.136807 |
| | (CDK9), E.137727 (ARHGAP20), E.138031 (ADCY3), E.138050 (THUMPD2), E.138069 |
| | (RAB1A), E.138594 (TMOD3), E.138760 (SCARB2), E.138796 (HADH), E.139613 |
| | (SMARCC2), E.139684 (ESD), E.140263 (SORD), E.140350 (ANP32A), E.140632 |
| | (GLYR1), E.142765 (SYTL1), E.143621 (ILF2), E.143933 (CALM2), E.144410 (CPO), |
| | E.147127 (RAB41), E.151304 (SRFBP1), E.151806 (GUF1), E.152207 (CYSLTR2), |
| | E.152234 (ATP5A1), E.152291 (TGOLN2), E.154723 (ATP5J), E.156467 (UQCRB), |
| | E.159387 (IRX6), E.159761 (C16orf86), E.161813 (LARP4), E.162613 (FUBP1), E.162694 |
| | (EXTL2), E.165264 (NDUFB6), E.167113 (COQ4), E.167513 (CDT1), E.167772 |
| | (ANGPTL4), E.167978 (SRRM2), E.168916 (ZNF608), E.169763 (PRYP3), E.169789 |
| | (PRY), E.169807 (PRY2), E.170017 (ALCAM), E.170144 (HNRNPA3), E.170310 (STX8), |
| | E.170954 (ZNF415), E.170959 (DCDC5), E.171302 (CANT1), E.171643 (S100Z), E.172283 |
| | (PRYP4), E.172590 (MRPL52), E.172867 (KRT2), E.173366 (TLR9), E.173599 (PC), |
| | E.177595 (PIDD), E.178473 (UCN3), E.179981 (TSHZ1), E.181163 (NPM1), E.182319 |
| | (Tyrosine-protein kinase SgK223), E.182795 (C1orf116), E.182944 (EWSR1), E.183092 |
| | (BEGAIN), E.183098 (GPC6), E.184254 (ALDH1A3), E.185619 (PCGF3), E.186889 |
| | (TMEM17), E.187837 (HIST1H1C), E.188771 (C11orf34), E.189060 (H1F0), E.196419 |
| | (XRCC6), E.196436 (NPIPL2), E.196504 (PRPF40A), E.196796, E.196993, E.197451 |
| | (HNRNPAB), E.197746 (PSAP), E.198131 (ZNF544), E.198156, E.198732 (SMOC1), |
| | E.198793 (MTOR), E.039068 (CDH1), E.173230 (GOLGB1), E.124193 (SRSF6), E.140497 |
| | (SCAMP2), E.168393 (DTYMK), E.184708 (EIF4ENIF1), E.124164 (VAPB), E.125753 |
| | (VASP), E.118260 (CREB1), E.135052 (GOLM1), E.010244 (ZNF207), E.010278 (CD9), |
| | E.047597 (XK), E.049246 (PER3), E.069849 (ATP1B3), E.072506 (HSD17B10), E.081138 |
| | (CDH7), E.099785 (MARCH2), E.104331 (IMPAD1), E.104812 (GYS1), E.120868 |
| | (APAF1), E.123908 (EIF2C2), E.125492 (BARHL1), E.127328 (RAB3IP), E.127329 |
| | (PTPRB), E.129514 (FOXA1), E.129657 (SEC14L1), E.129990 (SYT5), E.132881 (RSG1), |
| | E.136521 (NDUFB5), E.138347 (MYPN), E.141429 (GALNT1), E.144566 (RAB5A), |
| | E.151715 (TMEM45B), E.152582 (SPEF2), E.154957 (ZNF18), E.162385 (MAGOH), |
| | E.165410 (CFL2), E.168298 (HIST1H1E), E.169418 (NPR1), E.178187 (ZNF454), |
| | E.178741 (COX5A), E.179115 (FARSA), E.182732 (RGS6), E.183431 (SF3A3), E.185049 |
| | (WHSC2), E.196236 (XPNPEP3), E.197217 (ENTPD4), E.197813, E.203301, E.116833 |
| | (NR5A2), E.121057 (AKAP1), E.005471 (ABCB4), E.071859 (FAM50A), E.084234 |
| | (APLP2), E.101222 (SPEF1), E.103175 (WFDC1), E.103449 (SALL1), E.104805 (NUCB1), |
| | E.105514 (RAB3D), E.107816 (LZTS2), E.108375 (RNF43), E.109790 (KLHL5), E.112039 |
| | (FANCE), E.112715 (VEGFA), E.121690 (DEPDC7), E.125352 (RNF113A), E.134548 |
| | (C12orf39), E.136152 (COG3), E.143816 (WNT9A), E.147130 (ZMYM3), E.148396 |
| | (SEC16A), E.151092 (NGLY1), E.151779 (NBAS), E.155508 (CNOT8), E.163755 (HPS3), |
| | E.166526 (ZNF3), E.172733 (PURG), E.176371 (ZSCAN2), E.177674 (AGTRAP), |
| | E.181773 (GPR3), E.183048 (SLC25A10; MRPL12 SLC25A10), E.186376 (ZNF75D), |
| | E.187323 (DCC), E.198712 (MT-CO2), E.203908 (C6orf221; KHDC3L), E.001497 |
| | (LAS1L), E.009694 (ODZ1), E.080572 (CXorf41; PIH1D3), E.083093 (PALB2), E.089048 |
| | (ESF1), E.100065 (CARD10), E.100739 (BDKRB1), E.102904 (TSNAXIP1), E.104824 |
| | (HNRNPL), E.107404 (DVL1), E.110066 (SUV420H1), E.120328 (PCDHB12), E.121903 |
| | (ZSCAN20), E.122025 (FLT3), E.136930 (PSMB7), E.142025 (DMRTC2), E.144136 |
| | (SLC20A1), E.146535 (GNA12), E.147140 (NONO), E.153391 (INO80C), E.164919 |
| | (COX6C), E.171540 (OTP), E.177951 (BET1L), E.179796 (LRRC3B), E.197479 |
| | (PCDHB11), E.198804 (MT-CO1), E.086205 (FOLH1), E.100632 (ERH), E.100796 |
| | (SMEK1), E.104760 (FGL1), E.114302 (PRKAR2A), E.130299 (GTPBP3), E.133961 |
| | (NUMB), E.144485 (HES6), E.167085 (PHB), E.167635 (ZNF146), E.177239 (MAN1B1), |
| | E.184481 (FOXO4), E.188171 (ZNF626), E.189221 (MAOA), E.157637 (SLC38A10), |
| | E.100883 (SRP54), E.105618 (PRPF31), E.119421 (NDUFA8), E.170837 (GPR27), |
| | E.168148 (HIST3H3), E.135525 (MAP7), E.174996 (KLC2), E.018189 (RUFY3), E.183520 |
| | (UTP11L), E.173905 (GOLIM4), E.165280 (VCP), E.022976 (ZNF839), E.059691 |
| | (PET112), E.063244 (U2AF2), E.075651 (PLD1), E.089177 (KIF16B), E.089280 (FUS), |
| | E.094755 (GABRP), E.096060 (FKBP5), E.100023 (PPIL2), E.100359 (SGSM3), E.100612 |
| | (DHRS7), E.104131 (EIF3J), E.104419 (NDRG1), E.105409 (ATP1A3), E.107623 (GDF10), |
| | E.111335 (OAS2), E.113522 (RAD50), E.115053 (NCL), E.120837 (NFYB), E.122733 |
| | (KIAA1045), E.123178 (SPRYD7), E.124181 (PLCG1), E.126858 (RHOT1), E.128609 |
| | (NDUFA5), E.128683 (GAD1), E.130255 (RPL36), E.133874 (RNF122), E.135387 |
| | (CAPRIN1), E.135999 (EPC2), E.136383 (ALPK3), E.139405 (C12orf52), E.141012 |
| | (GALNS), E.143924 (EML4), E.144671 (SLC22A14), E.145741 (BTF3), E.145907 |
| | (G3BP1), E.149311 (ATM), E.153113 (CAST), E.157538 (DSCR3), E.157992 (KRTCAP3), |
| | E.158901 (WFDC8), E.165259 (HDX), E.169410 (PTPN9), E.170421 (KRT8), E.171155 |
| | (C1GALT1C1), E.172831 (CES2), E.173726 (TOMM20), E.176515, E.177565 (TBL1XR1), |
| | E.177628 (GBA), E.179091 (CYC1), E.189091 (SF3B3), E.197299 (BLM), E.197872 |
| | (FAM49A), E.198205 (ZXDA), E.198455 (ZXDB), E.082212 (ME2), E.109956 (B3GAT1), |
| | E.169710 (FASN), E.011304 (PTBP1), E.057252 (SOAT1), E.059378 (PARP12), E.082258 |
| | (CCNT2), E.087301 (TXNDC16), E.100575 (TIMM9), E.101152 (DNAJC5), E.101812 |
| | (H2BFM), E.102384 (CENPI), E.108641 (B9D1), E.119138 (KLF9), E.119820 (YIPF4), |
| | E.125995 (ROMO1), E.132323 (ILKAP), E.134809 (TIMM10), E.134955 (SLC37A2), |
| | E.135476 (ESPL1), E.136527 (TRA2B), E.137776 (SLTM), E.139211 (AMIGO2), E.139428 |
| | (MMAB), E.139874 (SSTR1), E.143321 (HDGF), E.164244 (PRRC1), E.164270 (HTR4), |
| | E.165119 (HNRNPK), E.165637 (VDAC2), E.165661 (QSOX2), E.167258 (CDK12), |
| | E.167815 (PRDX2), E.168014 (C2CD3), E.168653 (NDUFS5), E.168769 (TET2), E.169242 |
| | (EFNA1), E.175334 (BANF1), E.175416 (CLTB), E.177156 (TALDO1), E.180035 (ZNF48), |
| | E.186591 (UBE2H), E.187097 (ENTPD5), E.188739 (RBM34), E.196497 (IPO4), E.197323 |
| | (TRIM33), E.197857 (ZNF44), E.197976 (AKAP17A), E.064201 (TSPAN32), E.088992 |
| | (TESC), E.092421 (SEMA6A), E.100601 (ALKBH1), E.101557 (USP14), E.103035 |
| | (PSMD7), E.106128 (GHRHR), E.115541 (HSPE1), E.121390 (PSPC1), E.124216 (SNAI1), |
| | E.130713 (EXOSC2), E.132002 (DNAJB1), E.139697 (SBNO1), E.140481 (CCDC33), |
| | E.143013 (LMO4), E.145020 (AMT), E.145990 (GFOD1), E.146070 (PLA2G7), E.164924 |
| | (YWHAZ), E.165807 (PPP1R36), E.167751 (KLK2), E.169213 (RAB3B), E.170906 |
| | (NDUFA3), E.172725 (CORO1B), E.174332 (GLIS1), E.181924 (CHCHD8), E.183128 |
| | (CALHM3), E.204560 (DHX16), E.204574 (ABCF1), E.146701 (MDH2), E.198366 |
| | (HIST1H3A), E.081181 (ARG2), E.185896 (LAMP1), E.077514 (POLD3), E.099800 |
| | (TIMM13), E.100299 (ARSA), E.105419 (MEIS3), E.108417 (KRT37), E.113739 (STC2), |
| | E.125868 (DSTN), E.145908 (ZNF300), E.168575 (SLC20A2), E.182271 (TMIGD1), |
| | E.197223 (C1D), E.186834 (HEXIM1), E.001561 (ENPP4), E.011451 (WIZ), E.053108 |
| | (FSTL4), E.064655 (EYA2), E.065308 (TRAM2), E.075131 (TIPIN), E.081087 (OSTM1), |
| | E.092020 (PPP2R3C), E.096384 (HSP90AB1), E.100348 (TXN2), E.100577 (GSTZ1), |
| | E.100802 (C14orf93), E.101365 (IDH3B), E.101654 (RNMT), E.103067 (ESRP2), E.104064 |
| | (GABPB1), E.104823 (ECH1), E.106565 (TMEM176B), E.108561 (C1QBP), E.115257 |
| | (PCSK4), E.116127 (ALMS1), E.117411 (B4GALT2), E.119335 (SET), E.120337 |
| | (TNFSF18), E.122033 (MTIF3), E.122507 (BBS9), E.122870 (BICC1), E.130177 (CDC16), |
| | E.130193 (C8orf55; THEM6), E.130413 (STK33), E.130770 (ATPIF1), E.133687 (TMTC1), |
| | E.136874 (STX17), E.137409 (MTCH1), E.139626 (ITGB7), E.141744 (PNMT), E.145888 |
| | (GLRA1), E.146067 (FAM193B), E.146433 (TMEM181), E.149480 (MTA2), E.152377 |
| | (SPOCK1), E.152763 (WDR78), E.156976 (EIF4A2), E.157827 (FMNL2), E.158485 |
| | (CD1B), E.158863 (FAM160B2), E.161202 (DVL3), E.161714 (PLCD3), E.163064 (EN1), |
| | E.163468 (CCT3), E.164309 (CMYA5), E.164916 (FOXK1), E.165215 (CLDN3), E.167658 |
| | (EEF2), E.170549 (IRX1), E.171680 (PLEKHG5), E.178234 (GALNT11), E.179869 |
| | (ABCA13), E.179912 (R3HDM2), E.180869 (C1orf180), E.180979 (LRRC57), E.182872 |
| | (RBM10), E.183207 (RUVBL2), E.184113 (CLDN5), E.185972 (CCIN), E.189144 |
| | (ZNF573), E.197353 (LYPD2), E.197779 (ZNF81), E.198807 (PAX9), E.100442 (FKBP3), |
| | E.111790 (FGFR1OP2), E.136044 (APPL2), E.061794 (MRPS35), E.065427 (KARS), |
| | E.068885 (IFT80), E.104164 (PLDN; BLOC1S6), E.105127 (AKAP8), E.123066 |
| | (MED13L), E.124831 (LRRFIP1), E.125304 (TM9SF2), E.126934 (MAP2K2), E.130305 |
| | (NSUN5), E.135298 (BAI3), E.135900 (MRPL44), E.136371 (MTHFS), E.136574 |
| | (GATA4), E.140326 (CDAN1), E.141378 (PTRH2), E.141543 (EIF4A3), E.150961 |
| | (SEC24D), E.155368 (DBI), E.161649 (CD300LG), E.161692 (DBF4B), E.162437 |
| | (RAVER2), E.163257 (DCAF16), E.163576 (EFHB), E.163781 (TOPBP1), E.163913 |
| | (IFT122), E.164597 (COG5), E.165359 (DDX26B), E.165646 (SLC18A2), E.169592 |
| | (INO80E), E.169957 (ZNF768), E.171492 (LRRC8D), E.171793 (CTPS; CTPS1), E.171953 |
| | (ATPAF2), E.175182 (FAM131A), E.177354 (C10orf71), E.181610 (MRPS23), E.181873 |
| | (IBA57), E.187792 (ZNF70), E.187823 (ZCCHC16), E.196872 (C2orf55; KIAA1211L), |
| | E.198168 (SVIP), E.160633 (SAFB), E.177697 (CD151), E.181072 (CHRM2), E.012779 |
| | (ALOX5), E.065054 (SLC9A3R2), E.074071 (MRPS34), E.100815 (TRIP11), E.102030 |
| | (NAA10), E.106153 (CHCHD2), E.126814 (TRMT5), E.126952 (NXF5), E.136450 |
| | (SRSF1), E.136710 (CCDC115), E.137124 (ALDH1B1), E.143353 (LYPLAL1), E.162490 |
| | (C1orf187; DRAXIN), E.167799 (NUDT8), E.171490 (RSL1D1), E.173826 (KCNH6), |
| | E.173898 (SPTBN2), E.176900 (OR51T1), E.181513 (ACBD4), E.185554 (NXF2), |
| | E.185945 (NXF2B), E.108848 (LUC7L3), E.029363 (BCLAF1), E.038002 (AGA), E.108312 |
| | (UBTF), E.166341 (DCHS1), E.054118 (THRAP3), E.135679 (MDM2), E.166860 |
| | (ZBTB39), E.183684 (THOC4; ALYREF), E.004838 (ZMYND10), E.007264 (MATK), |
| | E.020922 (MRE11A), E.041353 (RAB27B), E.052795 (FNIP2), E.075711 (DLG1), |
| | E.087087 (SRRT), E.090060 (PAPOLA), E.095139 (ARCN1), E.099715 (PCDH11Y), |
| | E.100271 (TTLL1), E.101057 (MYBL2), E.101265 (RASSF2), E.101901 (ALG13), |
| | E.102290 (PCDH11X), E.103194 (USP10), E.106554 (CHCHD3), E.107833 (NPM3), |
| | E.110063 (DCPS), E.111540 (RAB5B), E.113448 (PDE4D), E.115339 (GALNT3), |
| | E.116254 (CHD5), E.117425 (PTCH2), E.117614 (SYF2), E.118181 (RPS25), E.118292 |
| | (C1orf54), E.119318 (RAD23B), E.121022 (COPS5), E.121104 (FAM117A), E.123427 |
| | (METTL21B), E.125676 (THOC2), E.132275 (RRP8), E.137513 (NARS2), E.138028 |
| | (CGREF1), E.139517 (LNX2), E.143614 (GATAD2B), E.143889 (HNRPLL), E.145833 |
| | (DDX46), E.147403 (RPL10), E.148158 (SNX30), E.151690 (MFSD6), E.153904 (DDAH1), |
| | E.154781 (C3orf19), E.156650 (KAT6B), E.158669 (AGPAT6), E.159363 (ATP13A2), |
| | E.163530 (DPPA2), E.164749 (HNF4G), E.165496 (RPL10L), E.165688 (PMPCA), |
| | E.165792 (METTL17), E.166598 (HSP90B1), E.168036 (CTNNB1), E.168746 (C20orf62), |
| | E.170381 (SEMA3E), E.171180 (OR2M4), E.171202 (TMEM126A), E.172594 |
| | (SMPDL3A), E.172653 (C17orf66), E.173540 (GMPPB), E.173585 (CCR9), E.173809 |
| | (TDRD12), E.175166 (PSMD2), E.177694 (NAALADL2), E.178026 (FAM211B; |
| | C22orf36), E.184363 (PKP3), E.187634 (SAMD11), E.203837 (PNLIPRP3), E.169122 |
| | (FAM110B), E.197969 (VPS13A), E.136068 (FLNB), E.075856 (SART3), E.081721 |
| | (DUSP12), E.102158 (MAGT1), E.102174 (PHEX), E.102316 (MAGED2), E.104723 |
| | (TUSC3), E.105939 (ZC3HAV1), E.108883 (EFTUD2), E.110328 (GALNTL4), E.111785 |
| | (RIC8B), E.113163 (COL4A3BP), E.115604 (IL18R1), E.117362 (APH1A), E.117480 |
| | (FAAH), E.124767 (GLO1), E.126267 (COX6B1), E.130175 (PRKCSH), E.135926 |
| | (TMBIM1), E.138674 (SEC31A), E.140451 (PIF1), E.143797 (MBOAT2), E.149646 |
| | (C20orf152), E.157064 (NMNAT2), E.160294 (MCM3AP), E.165084 (C8orf34), E.166946 |
| | (CCNDBP1), E.170348 (TMED10), E.170703 (TTLL6), E.175198 (PCCA), E.180287 |
| | (PLD5), E.183292 (MIR5096), E.187492 (CDHR4), E.188846 (RPL14), E.015479 |
| | (MATR3), E.100823 (APEX1), E.090615 (GOLGA3), E.086062 (B4GALT1), E.138385 |
| | (SSB), E.140265 (ZSCAN29), E.140932 (CMTM2), E.167969 (ECI1), E.135486 |
| | (HNRNPA1), E.137497 (NUMA1), E.181523 (SGSH), E.099956 (SMARCB1), E.049883 |
| | (PTCD2), E.082556 (OPRK1), E.090674 (MCOLN1), E.107164 (FUBP3), E.108582 (CPD), |
| | E.109758 (HGFAC), E.111605 (CPSF6), E.115239 (ASB3), E.121892 (PDS5A), E.125844 |
| | (RRBP1), E.130826 (DKC1), E.132481 (TRIM47), E.135390 (ATP5G2), E.136875 (PRPF4), |
| | E.138621 (PPCDC), E.145632 (PLK2), E.150051 (MKX), E.153140 (CETN3), E.154127 |
| | (UBASH3B), E.156194 (PPEF2), E.163825 (RTP3), E.164053 (ATRIP), E.164442 |
| | (CITED2), E.168066 (SF1), E.170430 (MGMT), E.175602 (CCDC85B), E.177752 (YIPF7), |
| | E.182512 (GLRX5), E.188186 (C7orf59), E.198721 (ECI2), E.204389 (HSPA1A), E.010256 |
| | (UQCRC1), E.076043 (REXO2), E.102362 (SYTL4), E.161939 (C17orf49), E.173039 |
| | (RELA), E.014216 (CAPN1), E.054938 (CHRDL2), E.065526 (SPEN), E.070501 (POLB), |
| | E.078808 (SDF4), E.083720 (OXCT1), E.100084 (HIRA), E.101246 (ARFRP1), E.102241 |
| | (HTATSF1), E.103591 (AAGAB), E.104626 (ERI1), E.105221 (AKT2), E.105402 (NAPA), |
| | E.105705 (SUGP1), E.106346 (USP42), E.108639 (SYNGR2), E.110107 (PRPF19), |
| | E.112473 (SLC39A7), E.113282 (CLINT1), E.115234 (SNX17), E.115561 (CHMP3), |
| | E.119906 (FAM178A), E.120733 (KDM3B), E.125375 (ATP5S), E.125798 (FOXA2), |
| | E.127415 (IDUA), E.129810 (SGOL1), E.132382 (MYBBP1A), E.133313 (CNDP2), |
| | E.134077 (THUMPD3), E.134248 (HBXIP), E.135597 (REPS1), E.137814 (HAUS2), |
| | E.138041 (SMEK2), E.140382 (HMG20A), E.143578 (CREB3L4), E.144224 (UBXN4), |
| | E.144306 (SCRN3), E.144741 (SLC25A26), E.145919 (BOD1), E.146281 (PM20D2), |
| | E.152359 (POC5), E.152409 (JMY), E.154889 (MPPE1), E.157551 (KCNJ15), E.157764 |
| | (BRAF), E.158987 (RAPGEF6), E.162069 (CCDC64B), E.162910 (MRPL55), E.163749 |
| | (CCDC158), E.164045 (CDC25A), E.164300 (SERINC5), E.165898 (ISCA2), E.167987 |
| | (VPS37C), E.168763 (CNNM3), E.170374 (SP7), E.171488 (LRRC8C), E.178381 |
| | (ZFAND2A), E.180998 (GPR137C), E.182318 (ZSCAN22), E.198040 (ZNF84), E.198216 |
| | (CACNA1E), E.198265 (HELZ), E.198586 (TLK1), E.203795 (FAM24A), E.204231 |
| | (RXRB), E.123992 (DNPEP), E.184634 (MED12), E.181885 (CLDN7), E.186660 (ZFP91), |
| | E.126777 (KTN1), E.080823 (MOK), E.101811 (CSTF2), E.124570 (SERPINB6), E.148835 |
| | (TAF5), E.158715 (SLC45A3), E.110955 (ATP5B), E.127022 (CANX), E.142208 (AKT1), |
| | E.128881 (TTBK2), E.147231 (CXorf57), E.006210 (CX3CL1), E.009830 (POMT2), |
| | E.011114 (BTBD7), E.065057 (NTHL1), E.068724 (TTC7A), E.073584 (SMARCE1), |
| | E.079785 (DDX1), E.084463 (WBP11), E.091140 (DLD), E.099821 (POLRMT), E.101126 |
| | (ADNP), E.104442 (ARMC1), E.105486 (LIG1), E.110921 (MVK), E.113441 (LNPEP), |
| | E.115758 (ODC1), E.116726 (PRAMEF12), E.119681 (LTBP2), E.136933 (RABEPK), |
| | E.137815 (RTF1), E.138095 (LRPPRC), E.138294 (MSMB), E.141873 (SLC39A3), |
| | E.142698 (C1orf94), E.143390 (RFX5), E.148488 (ST8SIA6), E.148737 (TCF7L2), |
| | E.151491 (EPS8), E.152422 (XRCC4), E.154832 (CXXC1), E.158321 (AUTS2), E.159147 |
| | (DONSON), E.160285 (LSS), E.160862 (AZGP1), E.160948 (VPS28), E.160972 |
| | (PPP1R16A), E.165934 (CPSF2), E.167604 (NFKBID), E.167766 (ZNF83), E.168803 |
| | (ADAL), E.169612 (FAM103A1), E.171262 (FAM98B), E.172893 (DHCR7), E.173889 |
| | (PHC3), E.176971 (FIBIN), E.177548 (RABEP2), E.179119 (SPTY2D1), E.184378 |
| | (ACTRT3), E.184508 (HDDC3), E.185043 (CIB1), E.186814 (ZSCAN30), E.186868 |
| | (MAPT), E.196812 (ZSCAN16), E.198563 (DDX39B), E.124529 (HIST1H4B), E.141002 |
| | (TCF25), E.174100 (MRPL45), E.109814 (UGDH), E.138756 (BMP2K), E.065457 |
| | (ADAT1), E.105948 (TTC26), E.109184 (DCUN1D4), E.125257 (ABCC4), E.126062 |
| | (TMEM115), E.142515 (KLK3), E.144381 (HSPD1), E.166710 (B2M), E.198824 |
| | (CHAMP1), E.078902 (TOLLIP), E.099331 (MYO9B), E.102710 (FAM48A), E.107485 |
| | (GATA3), E.120948 (TARDBP), E.187764 (SEMA4D), E.103855 (CD276), E.117751 |
| | (PPP1R8), E.173714 (WFIKKN2), E.172115 (CYCS), E.005882 (PDK2), E.007952 (NOX1), |
| | E.008118 (CAMK1G), E.012061 (ERCC1), E.015171 (ZMYND11), E.036257 (CUL3), |
| | E.057608 (GDI2), E.058729 (RIOK2), E.071246 (VASH1), E.073050 (XRCC1), E.073350 |
| | (LLGL2), E.079246 (XRCC5), E.085733 (CTTN), E.091542 (ALKBH5), E.091732 |
| | (ZC3HC1), E.092621 (PHGDH), E.099899 (TRMT2A), E.099917 (MED15), E.101439 |
| | (CST3), E.103479 (RBL2), E.104611 (SH2D4A), E.105281 (SLC1A5), E.106392 |
| | (C1GALT1), E.107104 (KANK1), E.107798 (LIPA), E.108296 (CWC25), E.109572 |
| | (CLCN3), E.112110 (MRPL18), E.113790 (EHHADH), E.115648 (MLPH), E.117308 |
| | (GALE), E.117335 (CD46), E.118513 (MYB), E.118640 (VAMP8), E.119321 (FKBP15), |
| | E.122705 (CLTA), E.123983 (ACSL3), E.124232 (RBPJL), E.125901 (MRPS26), E.127399 |
| | (LRRC61), E.127554 (GFER), E.128708 (HAT1), E.129355 (CDKN2D), E.130340 (SNX9), |
| | E.130935 (NOL11), E.131771 (PPP1R1B), E.133863 (TEX15), E.134207 (SYT6), E.136935 |
| | (GOLGA1), E.141425 (RPRD1A), E.143374 (TARS2), E.143771 (CNIH4), E.146966 |
| | (DENND2A), E.148672 (GLUD1), E.150593 (PDCD4), E.153936 (HS2ST1), E.154099 |
| | (DNAAF1), E.156006 (NAT2), E.156282 (CLDN17), E.158545 (ZC3H18), E.158604 |
| | (TMED4), E.158813 (EDA), E.159184 (HOXB13), E.161267 (BDH1), E.163492 |
| | (CCDC141), E.163629 (PTPN13), E.164163 (ABCE1), E.164520 (RAET1E), E.165138 |
| | (ANKS6), E.165923 (AGBL2), E.166484 (MAPK7), E.166747 (AP1G1), E.166971 |
| | (AKTIP), E.167744 (NTF4), E.168071 (CCDC88B), E.169087 (HSPBAP1), E.170396 |
| | (ZNF804A), E.170445 (HARS), E.170632 (ARMC10), E.170743 (SYT9), E.171428 |
| | (NAT1), E.172346 (CSDC2), E.173805 (HAP1), E.175175 (PPM1E), E.175203 (DCTN2), |
| | E.177542 (SLC25A22), E.177679 (SRRM3), E.178828 (RNF186), E.182013 (PNMAL1), |
| | E.182054 (IDH2), E.182890 (GLUD2), E.184156 (KCNQ3), E.184697 (CLDN6), E.184735 |
| | (DDX53), E.184840 (TMED9), E.185219 (ZNF445), E.186198 (SLC51B), E.186205 |
| | (MOSC1; MARC1), E.189143 (CLDN4), E.196700 (ZNF512B), E.196743 (GM2A), |
| | E.198087 (CD2AP), E.198951 (NAGA), E.204406 (MBD5), E.002330 (BAD), E.105404 |
| | (RABAC1), E.114127 (XRN1), E.117713 (ARID1A), E.123143 (PKN1), E.130764 |
| | (LRRC47), E.131773 (KHDRBS3), E.137806 (NDUFAF1), E.142864 (SERBP1), E.158747 |
| | (NBL1), E.175063 (UBE2C), E.178104 (PDE4DIP), E.186472 (PCLO), E.069956 (MAPK6), |
| | E.112941 (PAPD7), E.116604 (MEF2D), E.142875 (PRKACB), E.147133 (TAF1), |
| | E.157510 (AFAP1L1), E.006625 (GGCT), E.155980 (KIF5A), E.134444 (KIAA1468), |
| | E.107968 (MAP3K8), E.117592 (PRDX6), E.123154 (WDR83), E.135297 (MTO1), |
| | E.135829 (DHX9), E.149548 (CCDC15), E.152086 (TUBA3E), E.167553 (TUBA1C), |
| | E.169826 (CSGALNACT2), E.171121 (KCNMB3), E.198033 (TUBA3C), E.147724 |
| | (FAM135B), E.170854 (MINA), E.006695 (COX10), E.067369 (TP53BP1), E.089248 |
| | (ERP29), E.112096 (SOD2), E.138073 (PREB), E.146856 (AGBL3), E.159423 (ALDH4A1), |
| | E.171345 (KRT19), E.172345 (STARD5), E.111647 (UHRF1BP1L), E.117877 (CD3EAP), |
| | E.155714 (PDZD9), E.156603 (MED19), E.075886 (TUBA3D), E.167699 (GLOD4), |
| | E.121749 (TBC1D15), E.090861 (AARS), E.093010 (COMT), E.117676 (RPS6KA1), |
| | E.157502 (MUM1L1), E.159921 (GNE), E.169562 (GJB1), E.179776 (CDH5), E.071626 |
| | (DAZAP1), E.085224 (ATRX), E.116478 (HDAC1), E.117298 (ECE1), E.176171 (BNIP3), |
| | E.177425 (PAWR), E.179348 (GATA2), E.187840 (EIF4EBP1), E.033030 (ZCCHC8), |
| | E.049239 (H6PD), E.060688 (SNRNP40), E.075239 (ACAT1), E.095627 (TDRD1), |
| | E.109625 (CPZ), E.113719 (ERGIC1), E.126773 (C14orf135; PCNXL4), E.149218 |
| | (ENDOD1), E.162975 (KCNF1), E.183785 (TUBA8), E.198589 (LRBA), E.105379 (ETFB), |
| | E.011052 (NME2), E.011143 (MKS1), E.048544 (MRPS10), E.062485 (CS), E.114054 |
| | (PCCB), E.138587 (MNS1), E.155959 (VBP1), E.181222 (POLR2A), E.183723 (CMTM4), |
| | E.184661 (CDCA2), E.204316 (MRPL38), E.140694 (PARN), E.035141 (FAM136A), |
| | E.095485 (CWF19L1), E.115540 (MOB4), E.123595 (RAB9A), E.140678 (ITGAX), |
| | E.141258 (SGSM2), E.158941 (KIAA1967), E.169189 (NSMCE1), E.198431 (TXNRD1), |
| | E.016402 (IL20RA), E.112234 (FBXL4), E.125445 (MRPS7), E.128342 (LIF), E.164051 |
| | (CCDC51), E.175866 (BAIAP2), E.102780 (DGKH), E.203813 (HIST1H3H), E.198231 |
| | (DDX42), E.030582 (GRN), E.106049 (HIBADH), E.130810 (PPAN), E.132475 (H3F3B), |
| | E.158290 (CUL4B), E.166266 (CUL5), E.026559 (KCNG1), E.059122 (FLYWCH1), |
| | E.107897 (ACBD5), E.121068 (TBX2), E.125944 (HNRNPR), E.134308 (YWHAQ), |
| | E.137558 (PI15), E.137601 (NEK1), E.147548 (WHSC1L1), E.149182 (ARFGAP2), |
| | E.159658 (KIAA0494), E.165699 (TSC1), E.170927 (PKHD1), E.186575 (NF2), E.188021 |
| | (UBQLN2), E.167552 (TUBA1A), E.003756 (RBM5), E.134138 (MEIS2), E.008196 |
| | (TFAP2B), E.079313 (REXO1), E.089127 (OAS1), E.106078 (COBL), E.113645 (WWC1), |
| | E.116288 (PARK7), E.121940 (CLCC1), E.136280 (CCM2), E.141639 (MAPK4), E.147475 |
| | (ERLIN2), E.155660 (PDIA4), E.162298 (SYVN1), E.176978 (DPP7), E.176994 (SMCR8), |
| | E.178175 (ZNF366), E.196591 (HDAC2), E.127824 (TUBA4A), E.163932 (PRKCD), |
| | E.143375 (CGN), E.076864 (RAP1GAP), E.138772 (ANXA3), E.163041 (H3F3A), |
| | E.165813 (C10orf118), E.166337 (TAF10), E.178078 (STAP2), E.184007 (PTP4A2), |
| | E.167004 (PDIA3), E.039560 (RAI14), E.119636 (C14orf45), E.140374 (ETFA), E.143633 |
| | (C1orf131), E.144935 (TRPC1), E.156735 (BAG4), E.159348 (CYB5R1), E.170275 |
| | (CRTAP), E.172717 (FAM71D), E.172939 (OXSR1), E.176105 (YES1), E.078295 |
| | (ADCY2), E.119888 (EPCAM), E.141522 (ARHGDIA), E.184047 (DIABLO), E.109062 |
| | (SLC9A3R1), E.170037 (CNTROB), E.066557 (LRRC40), E.074964 (ARHGEF10L), |
| | E.078269 (SYNJ2), E.090013 (BLVRB), E.100142 (POLR2F), E.100399 (CHADL), |
| | E.104365 (IKBKB), E.111261 (MANSC1), E.111907 (TPD52L1), E.112578 (BYSL), |
| | E.121957 (GPSM2), E.122884 (P4HA1), E.124693 (HIST1H3B), E.126653 (NSRP1), |
| | E.130402 (ACTN4), E.138757 (G3BP2), E.150991 (UBC), E.164828 (SUN1), E.175216 |
| | (CKAP5), E.176155 (CCDC57), E.177459 (C8orf47), E.183856 (IQGAP3), E.185122 |
| | (HSF1), E.122952 (ZWINT), E.151093 (OXSM), E.067704 (IARS2), E.088899 (ProSAP- |
| | interacting protein 1), E.091483 (FH), E.114388 (NPRL2), E.114861 (FOXP1), E.135914 |
| | (HTR2B), E.197837 (HIST4H4), E.127720 (C12orf26; METTL25), E.123416 (TUBA1B), |
| | E.047410 (TPR), E.117748 (RPA2), E.133835 (HSD17B4), E.067248 (DHX29), E.121879 |
| | (PIK3CA), E.132589 (FLOT2), E.136750 (GAD2), E.160789 (LMNA), E.166329, E.170088 |
| | (TMEM192), E.175946 (KLHL38), E.178163 (ZNF518B), E.182217 (HIST2H4B), |
| | E.184470 (TXNRD2), E.110321 (EIF4G2), E.171861 (RNMTL1), E.065978 (YBX1), |
| | E.115738 (ID2), E.143294 (PRCC), E.158042 (MRPL17), E.169093 (ASMTL), E.090565 |
| | (RAB11FIP3), E.185591 (SP1), E.156304 (SCAF4), E.092978 (GPATCH2), E.100056 |
| | (DGCR14), E.100583 (SAMD15), E.105723 (GSK3A), E.107551 (RASSF4), E.107581 |
| | (EIF3A), E.107890 (ANKRD26), E.110104 (CCDC86), E.112584 (FAM120B), E.113580 |
| | (NR3C1), E.114491 (UMPS), E.137312 (FLOT1), E.137955 (RABGGTB), E.141994 |
| | (DUS3L), E.147044 (CASK), E.152818 (UTRN), E.180667 (YOD1), E.184916 (JAG2), |
| | E.196526 (AFAP1), E.198783 (ZNF830), E.108465 (CDK5RAP3), E.156515 (HK1), |
| | E.036448 (MYOM2), E.061918 (GUCY1B3), E.070785 (EIF2B3), E.116044 (NFE2L2), |
| | E.128311 (TST), E.131473 (ACLY), E.132716 (DCAF8), E.138363 (ATIC), E.166596 |
| | (WDR16), E.170027 (YWHAG), E.174021 (GNG5), E.203879 (GDI1), E.160049 (DFFA), |
| | E.010810 (FYN), E.051596 (THOC3), E.006453 (BAI1-associated protein 2-like 1), |
| | E.126945 (HNRNPH2), E.165695 (AK8), E.069869 (NEDD4), E.111801 (BTN3A3), |
| | E.112232 (KHDRBS2), E.128626 (MRPS12), E.129636 (ITFG1), E.137948 (BRDT), |
| | E.147257 (GPC3), E.155380 (SLC16A1), E.159692 (CTBP1), E.166833 (NAV2), E.172466 |
| | (ZNF24), E.175110 (MRPS22), E.176102 (CSTF3), E.179388 (EGR3), E.185359 (HGS), |
| | E.198001 (IRAK4), E.100603 (SNW1), E.162641 (AKNAD1), E.069712 (KIAA1107), |
| | E.073756 (PTGS2), E.077522 (ACTN2), E.101639 (CEP192), E.106633 (GCK), E.115241 |
| | (PPM1G), E.116649 (SRM), E.120370 (GORAB), E.124143 (ARHGAP40), E.127948 |
| | (POR), E.129315 (CCNT1), E.132646 (PCNA), E.135740 (SLC9A5), E.151726 (ACSL1), |
| | E.154380 (ENAH), E.157103 (SLC6A1), E.163930 (BAP1), E.164488 (DACT2), E.164754 |
| | (RAD21), E.175220 (ARHGAP1), E.180318 (ALX1), E.181234 (TMEM132C), E.197081 |
| | (IGF2R), E.092871 (RFFL), E.163644 (PPM1K), E.171723 (GPHN), E.108953 (YWHAE), |
| | E.072110 (ACTN1), E.077097 (TOP2B), E.090889 (KIF4A), E.114331 (ACAP2), E.114867 |
| | (EIF4G1), E.117593 (DARS2), E.118523 (CTGF), E.120915 (EPHX2), E.134759 (ELP2), |
| | E.138061 (CYP1B1), E.140743 (CDR2), E.151247 (EIF4E), E.152942 (RAD17), E.160685 |
| | (ZBTB7B), E.163923 (RPL39L), E.167642 (SPINT2), E.167996 (FTH1), E.185736 |
| | (ADARB2), E.198841 (KTI12), E.185860 (C1orf110), E.160226 (C21orf2), E.070814 |
| | (TCOF1), E.124749 (COL21A1), E.154639 (CXADR), E.065485 (PDIA5), E.023909 |
| | (GCLM), E.100714 (MTHFD1), E.108387 (SEPT4), E.160867 (FGFR4), E.134684 (YARS), |
| | E.123080 (CDKN2C), E.065548 (ZC3H15), E.116455 (WDR77), E.117448 (AKR1A1), |
| | E.100393 (EP300), E.138160 (KIF11), E.166263 (STXBP4), E.173473 (SMARCC1), |
| | E.124942 (AHNAK), E.174842 (GLMN), E.180198 (RCC1), E.185499 (MUC1), E.143947 |
| | (RPS27A), E.170315 (UBB), E.003402 (CFLAR), E.137055 (PLAA), E.142606 (MMEL1), |
| | E.147697 (GSDMC), E.163110 (PDLIM5), E.135842 (FAM129A), E.160691 (SHC1), |
| | E.197157 (SND1), E.029725 (RABEP1), E.127946 (HIP1), E.001036 (FUCA2), E.109846 |
| | (CRYAB), E.183831 (ANKRD45), E.189283 (FHIT), E.092820 (EZR), E.104067 (TJP1), |
| | E.120159 (C9orf82; CAAP1), E.154864 (PIEZO2), E.196975 (ANXA4), E.105220 (GPI), |
| | E.127914 (AKAP9), E.135870 (RC3H1), E.026508 (CD44), E.089154 (GCN1L1), E.100311 |
| | (PDGFB), E.119383 (PPP2R4), E.075624 (ACTB), E.177409 (SAMD9L), E.177731 (FLII), |
| | E.015676 (NUDCD3), E.146457 (WTAP), E.178950 (GAK), E.167110 (GOLGA2) |
| Prostate vesicle | LAMP2, ACPP, CTNNA1, HEBP2, ISOC2, HNRNPC, HNRNPM, TOMM22, TOM1, |
| | ACO2, KRT18, HSPA9, LMNB1, SPR, PPL, ALDH6A1, HNRNPA2B1, ATXN1, |
| | SMARCA4, ECHS1, PAICS, ILF3, PSME3, COX5B, RAB1A, SCARB2, HADH, ESD, |
| | SORD, ILF2, CALM2, ATP5A1, TGOLN2, ANGPTL4, ALCAM, KRT2, PC, NPM1, |
| | C1orf116, GPC6, ALDH1A3, HIST1H1C, XRCC6, HNRNPAB, PSAP, CDH1, SCAMP2, |
| | VASP, CD9, ATP1B3, HSD17B10, APAF1, EIF2C2, RAB5A, CFL2, FARSA, XPNPEP3, |
| | ENTPD4, APLP2, NUCB1, RAB3D, VEGFA, HPS3, TSNAXIP1, HNRNPL, PSMB7, |
| | GNA12, NONO, FOLH1, PRKAR2A, PHB, HIST3H3, MAP7, VCP, U2AF2, FUS, FKBP5, |
| | NDRG1, ATP1A3, NCL, RPL36, KRT8, C1GALT1C1, FASN, PTBP1, TXNDC16, |
| | DNAJC5, SLC37A2, HNRNPK, VDAC2, PRDX2, TALDO1, USP14, PSMD7, HSPE1, |
| | DNAJB1, YWHAZ, RAB3B, CORO1B, MDH2, HIST1H3A, LAMP1, STC2, DSTN, |
| | SLC20A2, ENPP4, WIZ, HSP90AB1, IDH3B, ECH1, C1QBP, SET, TNFSF18, ITGB7, |
| | SPOCK1, EIF4A2, CCT3, CLDN3, EEF2, LRRC57, RUVBL2, CLDN5, APPL2, TM9SF2, |
| | EIF4A3, DBI, DBF4B, SVIP, CD151, ALOX5, SLC9A3R2, RAB27B, DLG1, ARCN1, |
| | CHCHD3, RAB5B, RPS25, RPL10, DDAH1, HSP90B1, CTNNB1, PSMD2, PKP3, FLNB, |
| | EFTUD2, GLO1, PRKCSH, TMBIM1, SEC31A, TMED10, RPL14, MATR3, APEX1, |
| | B4GALT1, HNRNPA1, CPD, HSPA1A, CAPN1, CHRDL2, SPEN, SDF4, NAPA, |
| | SYNGR2, CHMP3, CNDP2, CCDC64B, SERINC5, VPS37C, DNPEP, CLDN7, KTN1, |
| | SERPINB6, ATP5B, CANX, AKT1, TTBK2, DDX1, DLD, LNPEP, LTBP2, LRPPRC, |
| | EPS8, AZGP1, VPS28, DHCR7, CIB1, DDX39B, HIST1H4B, UGDH, HSPD1, B2M, |
| | TOLLIP, CD276, CYCS, CUL3, GDI2, LLGL2, XRCC5, CTTN, PHGDH, CST3, RBL2, |
| | SLC1A5, CD46, VAMP8, CLTA, ACSL3, MRPS26, SNX9, GLUD1, TMED4, PTPN13, |
| | AP1G1, SYT9, DCTN2, IDH2, GLUD2, TMED9, CLDN4, GM2A, CD2AP, MBD5, |
| | SERBP1, NBL1, PRKACB, GGCT, PRDX6, DHX9, TUBA3E, TUBA1C, TUBA3C, |
| | ERP29, SOD2, KRT19, TUBA3D, AARS, COMT, MUM1L1, CDH5, ECE1, ACAT1, |
| | ENDOD1, TUBA8, ETFB, NME2, CS, VBP1, RAB9A, TXNRD1, LIF, BAIAP2, |
| | HIST1H3H, GRN, HIBADH, H3F3B, CUL4B, HNRNPR, YWHAQ, PKHD1, TUBA1A, |
| | PARK7, ERLIN2, PDIA4, TUBA4A, PRKCD, ANXA3, H3F3A, PTP4A2, PDIA3, ETFA, |
| | CYB5R1, CRTAP, OXSR1, YES1, EPCAM, ARHGDIA, DIABLO, SLC9A3R1, BLVRB, |
| | P4HA1, HIST1H3B, ACTN4, UBC, FH, HIST4H4, TUBA1B, HSD17B4, PIK3CA, FLOT2, |
| | LMNA, TMEM192, HIST2H4B, YBX1, EIF3A, FLOT1, UTRN, HK1, ACLY, ATIC, |
| | YWHAG, GNG5, GDI1, HNRNPH2, NEDD4, BTN3A3, SLC16A1, HGS, ACTN2, SRM, |
| | PCNA, ACSL1, RAD21, ARHGAP1, IGF2R, YWHAE, ACTN1, EIF4G1, EPHX2, EIF4E, |
| | FTH1, CXADR, MTHFD1, AKR1A1, STXBP4, AHNAK, MUC1, RPS27A, UBB, |
| | PDLIM5, FAM129A, SND1, FUCA2, CRYAB, EZR, TJP1, ANXA4, GPI, AKAP9, CD44, |
| | GCN1L1, ACTB, FLII, NUDCD3 |
| Prostate Cancer | EGFR, GLUD2, ANXA3, APLP2, BclG, Cofilin 2/cfL2, DCTN-50/DCTN2, DDAH1, |
| vesicles | ESD, FARSLA, GITRL, PRKCSH, SLC20A2, Synaptogyrin 2/SYNGR2, TM9SF2, |
| | Calnexin, TOMM22, NDRG1, RPL10, RPL14, USP14, VDAC2, LLGL2, CD63, CD81, |
| | uPAR/CD87, ADAM 9, BDKRB2, CCR5, CCT2 (TCP1-beta), PSMA, PSMA1, HSPB1, |
| | VAMP8, Rab1A, B4GALT1, Aspartyl Aminopeptidase/Dnpep, ATPase Na+/K+ beta |
| | 3/ATP1B3, BDNF, ATPB, beta 2 Microglobulin, Calmodulin 2/CALM2, CD9, XRCC5/ |
| | Ku80, SMARCA4, TOM1, Cytochrome C, Hsp10/HSPE1, COX2/PTGS2, Claudin 4/ |
| | CLDN4, Cytokeratin 8, Cortactin/CTTN, DBF4B/DRF1, ECH1, ECHS1, GOLPH2, ETS1, |
| | DIP13B/appl2, EZH2/KMT6, GSTP1, hK2/Kif2a, IQGAP1, KLK13, Lamp-2, GM2A, |
| | Hsp40/DNAJB1, HADH/HADHSC, Hsp90B, Nucleophosmin, p130/RBL2, PHGDH, |
| | RAB3B, ANXA1, PSMD7, PTBP1, Rab5a, SCARB2, Stanniocalcin 2/STC2, TGN46/ |
| | TGOLN2, TSNAXIP1, ANXA2, CD46, KLK14, IL1alpha, hnRNP C1 + C2, hnRNP A1, |
| | hnRNP A2B1, Claudin 5, CORO1B, Integrin beta 7, CD41, CD49d, CDH2, COX5b, IDH2, |
| | ME1, PhIP, ALDOA, EDNRB/EDN3, MTA1, NKX3-1, TMPRSS2, CD10, CD24, CDH1, |
| | ADAM10, B7H3, CD276, CHRDL2, SPOCK1, VEGFA, BCHE, CD151, CD166/ALCAM, |
| | CSE1L, GPC6, CXCR3, GAL3, GDF15, IGFBP-2, HGF, KLK12, ITGAL, KLK7, KLK9, |
| | MMP 2, MMP 25, MMP10, TNFRI, Notch1, PAP - same as ACPP, PTPN13/PTPL1, |
| | seprase/FAP, TNFR1, TWEAK, VEGFR2, E-Cadherin, Hsp60, CLDN3 - Claudin3, KLK6, |
| | KLK8, EDIL3 (del-1), APE1, MMP 1, MMP3, nAnS, PSP94/MSP/IGBF, PSAP, RPL19, |
| | SET, TGFB, TGM2, TIMP-1, TNFRII, MDH2, PKP1, Cystatin C, Trop2/TACSTD2, CCR2/ |
| | CD192, hnRNP M1-M4, CDKN1A, CGA, Cytokeratin 18, EpoR, GGPS1, FTL (light and |
| | heavy), GM-CSF, HSP90AA1, IDH3B, MKI67/Ki67, LTBP2, KLK1, KLK4, KLK5, LDH- |
| | A, Nav1.7/SCN9A, NRP1/CD304, PIP3/BPNT1, PKP3, CgA, PRDX2, SRVN, ATPase |
| | Na+/K+ alpha 3/ATP1A3, SLC3A2/CD98, U2AF2, TLR4 (CD284), TMPRSS1, TNFα, |
| | uPA, GloI, ALIX, PKM2, FABP5, CAV1, TLR9/CD289, ANXA4, PLEKHC1/Kindlin-2, |
| | CD71/TRFR, MBD5, SPEN/RBM15, LGALS8, SLC9A3R2, ENTPD4, ANGPTL4, p97/ |
| | VCP, TBX5, PTEN, Prohibitin, LSP1, HOXB13, DDX1, AKT1, ARF6, EZR, H3F3A, CIB1, |
| | Ku70 (XRCC6), KLK11, TMBIM6, SYT9, APAF1, CLDN7, MATR3, CD90/THY1, Tollip, |
| | NOTCH4, 14-3-3 zeta/beta, ATP5A1, DLG1, GRP94, FKBP5/FKBP51, LAMP1, |
| | LGALS3BP, GDI2, HSPA1A, NCL, KLK15, Cytokeratin basic, EDN-3, AGR2, KLK10, |
| | BRG1, FUS, Histone H4, hnRNP L, Catenin Alpha 1, hnRNP K (F45)*, MMP7*, DBI*, beta |
| | catenin, CTH, CTNND2, Ataxin 1, Proteasome 20S beta 7, ADE2, EZH2, GSTP1, Lamin |
| | B1, Coatomer Subunit Delta, ERAB, Mortalin, PKM2, IGFBP-3, CTNND1/delta 1-catenin/ |
| | p120-catenin, PKA R2, NONO, Sorbitol Dehydrogenase, Aconitase 2, VASP, Lipoamide |
| | Dehydrogenase, AP1G1, GOLPH2, ALDH6A1, AZGP1, Ago2, CNDP2, Nucleobindin-1, |
| | SerpinB6, RUVBL2, Proteasome 19S 10B, SH3PX1, SPR, Destrin, MDM4, FLNB, FASN, |
| | PSME |
| Prostate Cancer | 14-3-3 zeta/beta, Aconitase 2, ADAM 9, ADAM10, ADE2, AFM, Ago2, AGR2, AKT1, |
| vesicles | ALDH1A3, ALDH6A1, ALDOA, ALIX, ANGPTL4, ANXA1, ANXA2, ANXA3, ANXA3, |
| | ANXA4, AP1G1, APAF1, APE1, APLP2, APLP2, ARF6, Aspartyl Aminopeptidase/Dnpep, |
| | Ataxin 1, ATP5A1, ATPase Na+/K+ alpha 3/ATP1A3, ATPase Na+/K+ beta 3/ATP1B3, |
| | ATPase Na+/K+ beta 3/ATP1B3, ATPB, AZGP1, B4GALT1, B7H3, BCHE, BclG, |
| | BDKRB2, BDNF, BDNF, beta 2 Microglobulin, beta catenin, BRG1, CALM2, Calmodulin 2/ |
| | CALM2, Calnexin, Calpain 1, Catenin Alpha 1, CAV1, CCR2/CD192, CCR5, CCT2 |
| | (TCP1-beta), CD10, CD151, CD166/ALCAM, CD24, CD276, CD41, CD46, CD49d, CD63, |
| | CD71/TRFR, CD81, CD9, CD9, CD90/THY1, CDH1, CDH2, CDKN1A, CGA, CgA, |
| | CHRDL2, CIB1, CIB1, Claudin 4/CLDN4, Claudin 5, CLDN3, CLDN3 - Claudin3, CLDN4, |
| | CLDN7, CNDP2, Coatomer Subunit Delta, Cofilin 2/cfL2, CORO1B, Cortactin/CTTN, |
| | COX2/PTGS2, COX5b, CSE1L, CTH, CTNND1/delta 1-catenin/p120-catenin, |
| | CTNND2, CXCR3, CYCS, Cystatin C, Cytochrome C, Cytokeratin 18, Cytokeratin 8, |
| | Cytokeratin basic, DBF4B/DRF1, DBI*, DCTN-50/DCTN2, DDAH1, DDAH1, DDX1, |
| | Destrin, DIP13B/appl2, DIP13B/appl2, DLG1, Dnpep, E-Cadherin, ECH1, ECHS1, |
| | ECHS1, EDIL3 (del-1), EDN-3, EDNRB/EDN3, EGFR, EIF4A3, ENTPD4, EpoR, EpoR, |
| | ERAB, ESD, ESD, ETS1, ETS1, ETS-2, EZH2, EZH2/KMT6, EZR, FABP5, FARSLA, |
| | FASN, FKBP5/FKBP51, FLNB, FTL (light and heavy), FUS, GAL3, gamma-catenin, |
| | GDF15, GDI2, GGPS1, GGPS1, GITRL, GloI, GLUD2, GM2A, GM-CSF, |
| | GOLM1/GOLPH2 Mab; clone 3B10, GOLPH2, GOLPH2, GPC6, GRP94, GSTP1, GSTP1, |
| | H3F3A, HADH/HADHSC, HGF, HIST1H3A, Histone H4, hK2/Kif2a, hnRNP A1, hnRNP |
| | A2B1, hnRNP C1 + C2, hnRNP K (F45)*, hnRNP L, hnRNP M1-M4, HOXB13, Hsp10/ |
| | HSPE1, Hsp40/DNAJB1, Hsp60, HSP90AA1, Hsp90B, HSPA1A, HSPB1, IDH2, IDH3B, |
| | IDH3B, IGFBP-2, IGFBP-3, IgG1, IgG2A, IgG2B, IL1alpha, IL1alpha, Integrin beta 7, |
| | IQGAP1, ITGAL, KLHL12/C3IP1, KLK1, KLK10, KLK11, KLK12, KLK13, KLK14, |
| | KLK15, KLK4, KLK5, KLK6, KLK7, KLK8, KLK9, Ku70 (XRCC6), Lamin B1, LAMP1, |
| | Lamp-2, LDH-A, LGALS3BP, LGALS8, Lipoamide Dehydrogenase, LLGL2, LSP1, LSP1, |
| | LTBP2, MATR3, MBD5, MDH2, MDM4, ME1, MKI67/Ki67, MMP 1, MMP 2, MMP 25, |
| | MMP10, MMP-14/MT1-MMP, MMP3, MMP7*, Mortalin, MTA1, nAnS, nAnS, |
| | Nav1.7/SCN9A, NCL, NDRG1, NKX3-1, NONO, Notch1, NOTCH4, NRP1/CD304, |
| | Nucleobindin-1, Nucleophosmin, p130/RBL2, p97/VCP, PAP - same as ACPP, PHGDH, |
| | PhIP, PIP3/BPNT1, PKA R2, PKM2, PKM2, PKP1, PKP3, PLEKHC1/Kindlin-2, PRDX2, |
| | PRKCSH, Prohibitin, Proteasome 19S 10B, Proteasome 20S beta 7, PSAP, PSMA, PSMA1, |
| | PSMA1, PSMD7, PSMD7, PSME3, PSP94/MSP/IGBF, PTBP1, PTEN, PTPN13/PTPL1, |
| | Rab1A, RAB3B, Rab5a, Rad51b, RPL10, RPL10, RPL14, RPL14, RPL19, RUVBL2, |
| | SCARB2, seprase/FAP, SerpinB6, SET, SH3PX1, SLC20A2, SLC3A2/CD98, SLC9A3R2, |
| | SMARCA4, Sorbitol Dehydrogenase, SPEN/RBM15, SPOCK1, SPR, SRVN, Stanniocalcin |
| | 2/STC2, STEAP1, Synaptogyrin 2/SYNGR2, Syndecan, SYNGR2, SYT9, TAF1B/ |
| | GRHL1, TBX5, TGFB, TGM2, TGN46/TGOLN2, TIMP-1, TLR3, TLR4 (CD284), TLR9/ |
| | CD289, TM9SF2, TMBIM6, TMPRSS1, TMPRSS2, TNFR1, TNFRI, TNFRII, TNFSF18/ |
| | GITRL, TNFα, TNFα, Tollip, TOM1, TOMM22, Trop2/TACSTD2, TSNAXIP1, TWEAK, |
| | U2AF2, uPA, uPAR/CD87, USP14, USP14, VAMP8, VASP, VDAC2, VEGFA, |
| | VEGFR1/FLT1, VEGFR2, VPS28, XRCC5/Ku80, XRCC5/Ku80 |
| Prostate Vesicles/ | EpCAM/TROP-1, HSA, Fibrinogen, GAPDH, Cholesterol Oxidase, MMP7, Complement |
| General Vesicles | Factor D/Adipsin, E-Cadherin, Transferrin Antibody, eNOS, IgM, CD9, Apolipoprotein B |
| | (Apo B), Ep-CAM, TBG, Kallekerin 3, IgA, IgG, Annexin V, IgG, Pyruvate Carboxylase, |
| | trypsin, AFP, TNF RI/TNFRSF1A, Aptamer CAR023, Aptamer CAR024, Aptamer CAR025, |
| | Aptamer CAR026 |
| Ribonucleoprotein | GW182, Ago2, miR-let-7a, miR-16, miR-22, miR-148a, miR-451, miR-92a, CD9, CD63, |
| complexes & | CD81 |
| vesicles | |
| Prostate Cancer | PCSA, Muc2, Adam10 |
| vesicles | |
| Prostate Cancer | Alkaline Phosphatase (AP), CD63, MyoD1, Neuron Specific Enolase, MAP1B, CNPase, |
| vesicles | Prohibitin, CD45RO, Heat Shock Protein 27, Collagen II, Laminin B1/b1, Gai1, CDw75, bcl- |
| | XL, Laminin-s, Ferritin, CD21, ADP-ribosylation Factor (ARF-6) |
| Prostate Cancer | CD56/NCAM-1, Heat Shock Protein 27/hsp27, CD45RO, MAP1B, MyoD1, |
| vesicles | CD45/T200/LCA, CD3zeta, Laminin-s, bcl-XL, Rad18, Gai1, Thymidylate Synthase, |
| | Alkaline Phosphatase (AP), CD63, MMP-16/MT3-MMP, Cyclin C, Neuron Specific |
| | Enolase, SIRP a1, Laminin B1/b1, Amyloid Beta (APP), SODD (Silencer of Death Domain), |
| | CDC37, Gab-1, E2F-2, CD6, Mast Cell Chymase, Gamma Glutamylcysteine Synthetase |
| | (GCS) |
| Prostate Cancer | EpCAM, MMP7, PCSA, BCNP, ADAM10, KLK2, SPDEF, CD81, MFGE8, IL-8 |
| vesicles | |
| Prostate Cancer | EpCAM, KLK2, PBP, SPDEF, SSX2, SSX4 |
| vesicles | |
| Prostate Cancer | ADAM-10, BCNP, CD9, EGFR, EpCam, IL1B, KLK2, MMP7, p53, PBP, PCSA, |
| vesicles | SERPINB3, SPDEF, SSX2, SSX4 |
| Androgen Receptor | GTF2F1, CTNNB1, PTEN, APPL1, GAPDH, CDC37, PNRC1, AES, UXT, RAN, PA2G4, |
| (AR) pathway | JUN, BAG1, UBE2I, HDAC1, COX5B, NCOR2, STUB1, HIPK3, PXN, NCOA4 |
| members in cMVs | |
| EGFR1 pathway | RALBP1, SH3BGRL, RBBP7, REPS1, SNRPD2, CEBPB, APPL1, MAP3K3, EEF1A1, |
| members in cMVs | GRB2, RAC1, SNCA, MAP2K3, CEBPA, CDC42, SH3KBP1, CBL, PTPN6, YWHAB, |
| | FOXO1, JAK1, KRT8, RALGDS, SMAD2, VAV1, NDUFA13, PRKCB1, MYC, JUN, |
| | RFXANK, HDAC1, HIST3H3, PEBP1, PXN, TNIP1, PKN2 |
| TNF-alpha | BCL3, SMARCE1, RPS11, CDC37, RPL6, RPL8, PAPOLA, PSMC1, CASP3, AKT2, |
| pathway members | MAP3K7IP2, POLR2L, TRADD, SMARCA4, HIST3H3, GNB2L1, PSMD1, PEBP1, |
| in cMVs | HSPB1, TNIP1, RPS13, ZFAND5, YWHAQ, COMMD1, COPS3, POLR1D, SMARCC2, |
| | MAP3K3, BIRC3, UBE2D2, HDAC2, CASP8, MCMI, PSMD7, YWHAG, NFKBIA, |
| | CAST, YWHAB, G3BP2, PSMD13, FBL, RELB, YWHAZ, SKP1, UBE2D3, PDCD2, |
| | HSP90AA1, HDAC1, KPNA2, RPL30, GTF2I, PFDN2 |
| Colorectal cancer | CD9, EGFR, NGAL, CD81, STEAP, CD24, A33, CD66E, EPHA2, Ferritin, GPR30, |
| | GPR110, MMP9, OPN, p53, TMEM211, TROP2, TGM2, TIMP, EGFR, DR3, UNC93A, |
| | MUC17, EpCAM, MUC1, MUC2, TSG101, CD63, B7H3 |
| Colorectal cancer | DR3, STEAP, epha2, TMEM211, unc93A, A33, CD24, NGAL, EpCam, MUC17, TROP2, |
| | TETS |
| Colorectal cancer | A33, AFP, ALIX, ALX4, ANCA, APC, ASCA, AURKA, AURKB, B7H3, BANK1, BCNP, |
| | BDNF, CA-19-9, CCSA-2, CCSA-3&4, CD10, CD24, CD44, CD63, CD66 CEA, CD66e |
| | CEA, CD81, CD9, CDA, C-Erb2, CRMP-2, CRP, CRTN, CXCL12, CYFRA21-1, DcR3, |
| | DLL4, DR3, EGFR, Epcam, EphA2, FASL, FRT, GAL3, GDF15, GPCR (GPR110), GPR30, |
| | GRO-1, HBD 1, HBD2, HNP1-3, IL-1B, IL8, IMP3, L1CAM, LAMN, MACC-1, |
| | MGC20553, MCP-1, M-CSF, MIC1, MIF, MMP7, MMP9, MS4A1, MUC1, MUC17, |
| | MUC2, Ncam, NGAL, NNMT, OPN, p53, PCSA, PDGFRB, PRL, PSMA, PSME3, Reg IV, |
| | SCRN1, Sept-9, SPARC, SPON2, SPR, SRVN, TFF3, TGM2, TIMP-1, TMEM211, TNF- |
| | alpha, TPA, TPS, Trail-R2, Trail-R4, TrKB, TROP2, Tsg 101, TWEAK, UNC93A, VEGFA |
| Colorectal cancer | miR 92, miR 21, miR 9, miR 491 |
| Colorectal cancer | miR-127-3p, miR-92a, miR-486-3p, miR-378 |
| Colorectal cancer | TMEM211, MUC1, CD24 and/or GPR110 (GPCR 110) |
| Colorectal cancer | hsa-miR-376c, hsa-miR-215, hsa-miR-652, hsa-miR-582-5p, hsa-miR-324-5p, hsa-miR- |
| | 1296, hsa-miR-28-5p, hsa-miR-190, hsa-miR-590-5p, hsa-miR-202, hsa-miR-195 |
| Colorectal cancer | A26C1A, A26C1B, A2M, ACAA2, ACE, ACOT7, ACP1, ACTA1, ACTA2, ACTB, |
| vesicle markers | ACTBL2, ACTBL3, ACTC1, ACTG1, ACTG2, ACTN1, ACTN2, ACTN4, ACTR3, |
| | ADAM10, ADSL, AGR2, AGR3, AGRN, AHCY, AHNAK, AKR1B10, ALB, ALDH16A1, |
| | ALDH1A1, ALDOA, ANXA1, ANXA11, ANXA2, ANXA2P2, ANXA4, ANXA5, ANXA6, |
| | AP2A1, AP2A2, APOA1, ARF1, ARF3, ARF4, ARF5, ARF6, ARHGDIA, ARPC3, |
| | ARPC5L, ARRDC1, ARVCF, ASCC3L1, ASNS, ATP1A1, ATP1A2, ATP1A3, ATP1B1, |
| | ATP4A, ATP5A1, ATP5B, ATP5I, ATP5L, ATP5O, ATP6AP2, B2M, BAIAP2, |
| | BAIAP2L1, BRI3BP, BSG, BUB3, C1orf58, C5orf32, CAD, CALM1, CALM2, CALM3, |
| | CAND1, CANX, CAPZA1, CBR1, CBR3, CCT2, CCT3, CCT4, CCT5, CCT6A, CCT7, |
| | CCT8, CD44, CD46, CD55, CD59, CD63, CD81, CD82, CD9, CDC42, CDH1, CDH17, |
| | CEACAM5, CFL1, CFL2, CHMP1A, CHMP2A, CHMP4B, CKB, CLDN3, CLDN4, |
| | CLDN7, CLIC1, CLIC4, CLSTN1, CLTC, CLTCL1, CLU, COL12A1, COPB1, COPB2, |
| | CORO1C, COX4I1, COX5B, CRYZ, CSPG4, CSRP1, CST3, CTNNA1, CTNNB1, |
| | CTNND1, CTTN, CYFIP1, DCD, DERA, DIP2A, DIP2B, DIP2C, DMBT1, DPEP1, DPP4, |
| | DYNC1H1, EDIL3, EEF1A1, EEF1A2, EEF1AL3, EEF1G, EEF2, EFNB1, EGFR, EHD1, |
| | EHD4, EIF3EIP, EIF3I, EIF4A1, EIF4A2, ENO1, ENO2, ENO3, EPHA2, EPHA5, EPHB1, |
| | EPHB2, EPHB3, EPHB4, EPPK1, ESD, EZR, F11R, F5, F7, FAM125A, FAM125B, |
| | FAM129B, FASLG, FASN, FAT, FCGBP, FER1L3, FKBP1A, FLNA, FLNB, FLOT1, |
| | FLOT2, G6PD, GAPDH, GARS, GCN1L1, GDI2, GK, GMDS, GNA13, GNAI2, GNAI3, |
| | GNAS, GNB1, GNB2, GNB2L1, GNB3, GNB4, GNG12, GOLGA7, GPA33, GPI, |
| | GPRC5A, GSN, GSTP1, H2AFJ, HADHA, hCG_1757335, HEPH, HIST1H2AB, |
| | HIST1H2AE, HIST1H2AJ, HIST1H2AK, HIST1H4A, HIST1H4B, HIST1H4C, HIST1H4D, |
| | HIST1H4E, HIST1H4F, HIST1H4H, HIST1H4I, HIST1H4J, HIST1H4K, HIST1H4L, |
| | HIST2H2AC, HIST2H4A, HIST2H4B, HIST3H2A, HIST4H4, HLA-A, HLA-A29.1, HLA- |
| | B, HLA-C, HLA-E, HLA-H, HNRNPA2B1, HNRNPH2, HPCAL1, HRAS, HSD17B4, |
| | HSP90AA1, HSP90AA2, HSP90AA4P, HSP90AB1, HSP90AB2P, HSP90AB3P, HSP90B1, |
| | HSPA1A, HSPA1B, HSPA1L, HSPA2, HSPA4, HSPA5, HSPA6, HSPA7, HSPA8, HSPA9, |
| | HSPD1, HSPE1, HSPG2, HYOU1, IDH1, IFITM1, IFITM2, IFITM3, IGH@, IGHG1, |
| | IGHG2, IGHG3, IGHG4, IGHM, IGHV4-31, IGK@, IGKC, IGKV1-5, IGKV2-24, IGKV3- |
| | 20, IGSF3, IGSF8, IQGAP1, IQGAP2, ITGA2, ITGA3, ITGA6, ITGAV, ITGB1, ITGB4, |
| | JUP, KIAA0174, KIAA1199, KPNB1, KRAS, KRT1, KRT10, KRT13, KRT14, KRT15, |
| | KRT16, KRT17, KRT18, KRT19, KRT2, KRT20, KRT24, KRT25, KRT27, KRT28, KRT3, |
| | KRT4, KRT5, KRT6A, KRT6B, KRT6C, KRT7, KRT75, KRT76, KRT77, KRT79, KRT8, |
| | KRT9, LAMA5, LAMP1, LDHA, LDHB, LFNG, LGALS3, LGALS3BP, LGALS4, LIMA1, |
| | LIN7A, LIN7C, LOC100128936, LOC100130553, LOC100133382, LOC100133739, |
| | LOC284889, LOC388524, LOC388720, LOC442497, LOC653269, LRP4, LRPPRC, |
| | LRSAM1, LSR, LYZ, MAN1A1, MAP4K4, MARCKS, MARCKSL1, METRNL, MFGE8, |
| | MICA, MIF, MINK1, MITD1, MMP7, MOBKL1A, MSN, MTCH2, MUC13, MYADM, |
| | MYH10, MYH11, MYH14, MYH9, MYL6, MYL6B, MYO1C, MYO1D, NARS, NCALD, |
| | NCSTN, NEDD4, NEDD4L, NME1, NME2, NOTCH1, NQO1, NRAS, P4HB, PCBP1, |
| | PCNA, PCSK9, PDCD6, PDCD6IP, PDIA3, PDXK, PEBP1, PFN1, PGK1, PHB, PHB2, |
| | PKM2, PLEC1, PLEKHB2, PLSCR3, PLXNA1, PLXNB2, PPIA, PPIB, PPP2R1A, PRDX1, |
| | PRDX2, PRDX3, PRDX5, PRDX6, PRKAR2A, PRKDC, PRSS23, PSMA2, PSMC6, |
| | PSMD11, PSMD3, PSME3, PTGFRN, PTPRF, PYGB, QPCT, QSOX1, RAB10, RAB11A, |
| | RAB11B, RAB13, RAB14, RAB15, RAB1A, RAB1B, RAB2A, RAB33B, RAB35, RAB43, |
| | RAB4B, RAB5A, RAB5B, RAB5C, RAB6A, RAB6B, RAB7A, RAB8A, RAB8B, RAC1, |
| | RAC3, RALA, RALB, RAN, RANP1, RAP1A, RAP1B, RAP2A, RAP2B, RAP2C, RDX, |
| | REG4, RHOA, RHOC, RHOG, ROCK2, RP11-631M21.2, RPL10A, RPL12, RPL6, RPL8, |
| | RPLP0, RPLP0-like, RPLP1, RPLP2, RPN1, RPS13, RPS14, RPS15A, RPS16, RPS18, |
| | RPS20, RPS21, RPS27A, RPS3, RPS4X, RPS4Y1, RPS4Y2, RPS7, RPS8, RPSA, |
| | RPSAP15, RRAS, RRAS2, RUVBL1, RUVBL2, S100A10, S100A11, S100A14, S100A16, |
| | S100A6, S100P, SDC1, SDC4, SDCBP, SDCBP2, SERINC1, SERINC5, SERPINA1, |
| | SERPINF1, SETD4, SFN, SLC12A2, SLC12A7, SLC16A1, SLC1A5, SLC25A4, SLC25A5, |
| | SLC25A6, SLC29A1, SLC2A1, SLC3A2, SLC44A1, SLC7A5, SLC9A3R1, SMPDL3B, |
| | SNAP23, SND1, SOD1, SORT1, SPTAN1, SPTBN1, SSBP1, SSR4, TACSTD1, TAGLN2, |
| | TBCA, TCEB1, TCP1, TF, TFRC, THBS1, TJP2, TKT, TMED2, TNFSF10, TNIK, |
| | TNKS1BP1, TNPO3, TOLLIP, TOMM22, TPI1, TPM1, TRAP1, TSG101, TSPAN1, |
| | TSPAN14, TSPAN15, TSPAN6, TSPAN8, TSTA3, TTYH3, TUBA1A, TUBA1B, |
| | TUBA1C, TUBA3C, TUBA3D, TUBA3E, TUBA4A, TUBA4B, TUBA8, TUBB, TUBB2A, |
| | TUBB2B, TUBB2C, TUBB3, TUBB4, TUBB4Q, TUBB6, TUFM, TXN, UBA1, UBA52, |
| | UBB, UBC, UBE2N, UBE2V2, UGDH, UQCRC2, VAMP1, VAMP3, VAMP8, VCP, VIL1, |
| | VPS25, VPS28, VPS35, VPS36, VPS37B, VPS37C, WDR1, YWHAB, YWHAE, YWHAG, |
| | YWHAH, YWHAQ, YWHAZ |
| Colorectal Cancer | hsa-miR-16, hsa-miR-25, hsa-miR-125b, hsa-miR-451, hsa-miR-200c, hsa-miR-140-3p, hsa- |
| | miR-658, hsa-miR-370, hsa-miR-1296, hsa-miR-636, hsa-miR-502-5p |
| Breast cancer | miR-21, miR-155, miR-206, miR-122a, miR-210, miR-21, miR-155, miR-206, miR-122a, |
| | miR-210, let-7, miR-10b, miR-125a, miR-125b, miR-145, miR-143, miR-145, miR-1b |
| Breast cancer | GAS5 |
| Breast cancer | ER, PR, HER2, MUC1, EGFR, KRAS, B-Raf, CYP2D6, hsp70, MART-1, TRP, HER2, |
| | hsp70, MART-1, TRP, HER2, ER, PR, Class III b-tubulin, VEGFA, ETV6-NTRK3, BCA- |
| | 225, hsp70, MART1, ER, VEGFA, Class III b-tubulin, HER2/neu (e.g., for Her2+ breast |
| | cancer), GPR30, ErbB4 (JM) isoform, MPR8, MISIIR, CD9, EphA2, EGFR, B7H3, PSM, |
| | PCSA, CD63, STEAP, CD81, ICAM1, A33, DR3, CD66e, MFG-E8, TROP-2, |
| | Mammaglobin, Hepsin, NPGP/NPFF2, PSCA, 5T4, NGAL, EpCam, neurokinin receptor-1 |
| | (NK-1 or NK-1R), NK-2, Pai-1, CD45, CD10, HER2/ERBB2, AGTR1, NPY1R, MUC1, |
| | ESA, CD133, GPR30, BCA225, CD24, CA15.3 (MUC1 secreted), CA27.29 (MUC1 |
| | secreted), NMDAR1, NMDAR2, MAGEA, CTAG1B, NY-ESO-1, SPB, SPC, NSE, PGP9.5, |
| | progesterone receptor (PR) or its isoform (PR(A) or PR(B)), P2RX7, NDUFB7, NSE, GAL3, |
| | osteopontin, CHI3L1, IC3b, mesothelin, SPA, AQP5, GPCR, hCEA-CAM, PTP IA-2, |
| | CABYR, TMEM211, ADAM28, UNC93A, MUC17, MUC2, IL10R-beta, BCMA, |
| | HVEM/TNFRSF14, Trappin-2, Elafin, ST2/IL1 R4, TNFRF14, CEACAM1, TPA1, LAMP, |
| | WF, WH1000, PECAM, BSA, TNFR |
| Breast cancer | CD9, MIS Rii, ER, CD63, MUC1, HER3, STAT3, VEGFA, BCA, CA125, CD24, EPCAM, |
| | ERB B4 |
| Breast cancer | CD10, NPGP/NPFF2, HER2/ERBB2, AGTR1, NPY1R, neurokinin receptor-1 (NK-1 or NK- |
| | 1R), NK-2, MUC1, ESA, CD133, GPR30, BCA225, CD24, CA15.3 (MUC1 secreted), |
| | CA27.29 (MUC1 secreted), NMDAR1, NMDAR2, MAGEA, CTAG1B, NY-ESO-1 |
| Breast cancer | SPB, SPC, NSE, PGP9.5, CD9, P2RX7, NDUFB7, NSE, GAL3, osteopontin, CHI3L1, |
| | EGFR, B7H3, IC3b, MUC1, mesothelin, SPA, PCSA, CD63, STEAP, AQP5, CD81, DR3, |
| | PSM, GPCR, EphA2, hCEA-CAM, PTP IA-2, CABYR, TMEM211, ADAM28, UNC93A, |
| | A33, CD24, CD10, NGAL, EpCam, MUC17, TROP-2, MUC2, IL10R-beta, BCMA, |
| | HVEM/TNFRSF14, Trappin-2 Elafin, ST2/IL1 R4, TNFRF14, CEACAM1, TPA1, LAMP, |
| | WF, WH1000, PECAM, BSA, TNFR |
| Breast cancer | BRCA, MUC-1, MUC 16, CD24, ErbB4, ErbB2 (HER2), ErbB3, HSP70, Mammaglobin, |
| | PR, PR(B), VEGFA |
| Breast cancer | CD9, HSP70, Gal3, MIS, EGFR, ER, ICB3, CD63, B7H4, MUC1, DLL4, CD81, ERB3, |
| | VEGF, BCA225, BRCA, CA125, CD174, CD24, ERB2, NGAL, GPR30, CYFRA21, CD31, |
| | cMET, MUC2, ERBB4 |
| Breast cancer | CD9, EphA2, EGFR, B7H3, PSMA, PCSA, CD63, STEAP, CD81, STEAP1, ICAM1 |
| | (CD54), PSMA, A33, DR3, CD66e, MFG-8e, TMEM211, TROP-2, EGFR, Mammoglobin, |
| | Hepsin, NPGP/NPFF2, PSCA, 5T4, NGAL, NK-2, EpCam, NK-1R, PSMA, 5T4, PAI-1, |
| | CD45 |
| Breast cancer | PGP9.5, CD9, HSP70, gal3-b2c10, EGFR, iC3b, PSMA, PCSA, CD63, MUC1, DLL4, |
| | CD81, B7-H3, HER 3 (ErbB3), MART-1, PSA, VEGF A, TIMP-1, GPCR GPR110, EphA2, |
| | MMP9, mmp7, TMEM211, UNC93a, BRCA, CA125 (MUC16), Mammaglobin, CD174 |
| | (Lewis y), CD66e CEA, CD24 c.sn3, C-erbB2, CD10, NGAL, epcam, CEA |
| | (carcinoembryonic Antigen), GPR30, CYFRA21-1, OPN, MUC17, hVEGFR2, MUC2, |
| | NCAM, ASPH, ErbB4, SPB, SPC, CD9, MS4A1, EphA2, MIS RII, HER2 (ErbB2), ER, PR |
| | (B), MRP8, CD63, B7H4, TGM2, CD81, DR3, STAT 3, MACC-1, TrKB, IL 6 Unc, OPG- |
| | 13, IL6R, EZH2, SCRN1, TWEAK, SERPINB3, CDAC1, BCA-225, DR3, A33, |
| | NPGP/NPFF2, TIMP1, BDNF, FRT, Ferritin heavy chain, seprase, p53, LDH, HSP, ost, p53, |
| | CXCL12, HAP, CRP, Gro-alpha, Tsg 101, GDF15 |
| Breast cancer | CD9, HSP70, Gal3, MIS (RII), EGFR, ER, ICB3, CD63, B7H4, MUC1, CD81, ERB3, |
| | MART1, STAT3, VEGF, BCA225, BRCA, CA125, CD174, CD24, ERB2, NGAL, GPR30, |
| | CYFRA21, CD31, cMET, MUC2, ERB4, TMEM211 |
| Breast Cancer | 5T4 (trophoblast), ADAM10, AGER/RAGE, APC, APP (β-amyloid), ASPH (A-10), B7H3 |
| | (CD276), BACE1, BAI3, BRCA1, BDNF, BIRC2, C1GALT1, CA125 (MUC16), |
| | Calmodulin 1, CCL2 (MCP-1), CD9, CD10, CD127 (IL7R), CD174, CD24, CD44, CD63, |
| | CD81, CEA, CRMP-2, CXCR3, CXCR4, CXCR6, CYFRA 21, derlin 1, DLL4, DPP6, E- |
| | CAD, EpCaM, EphA2 (H-77), ER(1) ESR1α, ER(2) ESR2β, Erb B4, Erbb2, erb3 (Erb-B3), |
| | PA2G4, FRT (FLT1), Gal3, GPR30 (G-coupled ER1), HAP1, HER3, HSP-27, HSP70, IC3b, |
| | IL8, insig, junction plakoglobin, Keratin 15, KRAS, Mammaglobin, MART1, MCT2, |
| | MFGE8, MMP9, MRP8, Muc1, MUC17, MUC2, NCAM, NG2 (CSPG4), Ngal, NHE-3, |
| | NT5E (CD73), ODC1, OPG, OPN, p53, PARK7, PCSA, PGP9.5 (PARK5), PR(B), PSA, |
| | PSMA, RAGE, STXBP4, Survivin, TFF3 (secreted), TIMP1, TIMP2, TMEM211, TRAF4 |
| | (scaffolding), TRAIL-R2 (death Receptor 5), TrkB, Tsg 101, UNC93a, VEGF A, VEGFR2, |
| | YB-1, VEGFR1, GCDPF-15 (PIP), BigH3 (TGFb1-induced protein), 5HT2B (serotonin |
| | receptor 2B), BRCA2, BACE 1, CDH1-cadherin |
| Breast Cancer | AK5.2, ATP6V1B1, CRABP1 |
| Breast Cancer | DST.3, GATA3, KRT81 |
| Breast Cancer | AK5.2, ATP6V1B1, CRABP1, DST.3, ELF5, GATA3, KRT81, LALBA, OXTR, RASL10A, |
| | SERHL, TFAP2A.1, TFAP2A.3, TFAP2C, VTCN1 |
| Breast Cancer | TRAP; Renal Cell Carcinoma; Filamin; 14.3.3, Pan; Prohibitin; c-fos; Ang-2; GSTmu; Ang- |
| | 1; FHIT; Rad51; Inhibin alpha; Cadherin-P; 14.3.3 gamma; p18INK4c; P504S; XRCC2; |
| | Caspase 5; CREB-Binding Protein; Estrogen Receptor; IL17; Claudin 2; Keratin 8; GAPDH; |
| | CD1; Keratin, LMW; Gamma Glutamylcysteine Synthetase(GCS)/Glutamate-cysteine |
| | Ligase; a-B-Crystallin; Pax-5; MMP-19; APC; IL-3; Keratin 8 (phospho-specific Ser73); |
| | TGF-beta 2; ITK; Oct-2/; DJ-1; B7-H2; Plasma Cell Marker; Rad18; Estriol; Chk1; Prolactin |
| | Receptor; Laminin Receptor; Histone H1; CD45RO; GnRH Receptor; IP10/CRG2; Actin, |
| | Muscle Specific; S100; Dystrophin; Tubulin-a; CD3zeta; CDC37; GABA a Receptor 1; |
| | MMP-7 (Matrilysin); Heregulin; Caspase 3; CD56/NCAM-1; Gastrin 1; SREBP-1 (Sterol |
| | Regulatory Element Binding Protein-1); MLH1; PGP9.5; Factor VIII Related Antigen; ADP- |
| | ribosylation Factor (ARF-6); MHC II (HLA-DR) Ia; Survivin; CD23; G-CSF; CD2; |
| | Calretinin; Neuron Specific Enolase; CD165; Calponin; CD95/Fas; Urocortin; Heat Shock |
| | Protein 27/hsp27; Topo II beta; Insulin Receptor; Keratin 5/8; sm; Actin, skeletal muscle; |
| | CA19-9; GluR1; GRIP1; CD79a mb-1; TdT; HRP; CD94; CCK-8; Thymidine |
| | Phosphorylase; CD57; Alkaline Phosphatase (AP); CD59/MACIF/MIRL/Protectin; |
| | GLUT-1; alpha-1-antitrypsin; Presenillin; Mucin 3 (MUC3); pS2; 14-3-3 beta; MMP-13 |
| | (Collagenase-3); Fli-1; mGluR5; Mast Cell Chymase; Laminin B1/b1; Neurofilament |
| | (160 kDa); CNPase; Amylin Peptide; Gai1; CD6; alpha-1-antichymotrypsin; E2F-2; MyoD1 |
| Ductal carcinoma | Laminin B1/b1; E2F-2; TdT; Apolipoprotein D; Granulocyte; Alkaline Phosphatase (AP); |
| in situ (DCIS) | Heat Shock Protein 27/hsp27; CD95/Fas; pS2; Estriol; GLUT-1; Fibronectin; CD6; CCK-8; |
| | sm; Factor VIII Related Antigen; CD57; Plasminogen; CD71/Transferrin Receptor; Keratin |
| | 5/8; Thymidine Phosphorylase; CD45/T200/LCA; Epithelial Specific Antigen; Macrophage; |
| | CD10; MyoD1; Gai1; bcl-XL; hPL; Caspase 3; Actin, skeletal muscle; IP10/CRG2; GnRH |
| | Receptor; p35nck5a; ADP-ribosylation Factor (ARF-6); Cdk4; alpha-1-antitrypsin; IL17; |
| | Neuron Specific Enolase; CD56/NCAM-1; Prolactin Receptor; Cdk7; CD79a mb-1; Collagen |
| | IV; CD94; Myeloid Specific Marker; Keratin 10; Pax-5; IgM (m-Heavy Chain); CD45RO; |
| | CA19-9; Mucin 2; Glucagon; Mast Cell Chymase; MLH1; CD1; CNPase; Parkin; MHC II |
| | (HLA-DR) Ia; B7-H2; Chk1; Lambda Light Chain; MHC II (HLA-DP and DR); Myogenin; |
| | MMP-7 (Matrilysin); Topo II beta; CD53; Keratin 19; Rad18; Ret Oncoprotein; MHC II |
| | (HLA-DP); E3-binding protein (ARM1); Progesterone Receptor; Keratin 8; IgG; IgA; |
| | Tubulin; Insulin Receptor Substrate-1; Keratin 15; DR3; IL-3; Keratin 10/13; Cyclin D3; |
| | MHC I (HLA25 and HLA-Aw32); Calmodulin; Neurofilament (160 kDa) |
| Ductal carcinoma | Macrophage; Fibronectin; Granulocyte; Keratin 19; Cyclin D3; CD45/T200/LCA; EGFR; |
| in situ (DCIS) v. | Thrombospondin; CD81/TAPA-1; Ruv C; Plasminogen; Collagen IV; Laminin B1/b1; CD10; |
| other Breast cancer | TdT; Filamin; bcl-XL; 14.3.3 gamma; 14.3.3, Pan; p170; Apolipoprotein D; CD71/ |
| | Transferrin Receptor; FHIT |
| Breast cancer | 5HT2B, 5T4 (trophoblast), ACO2, ACSL3, ACTN4, ADAM10, AGR2, AGR3, ALCAM, |
| | ALDH6A1, ANGPTL4, ANO9, AP1G1, APC, APEX1, APLP2, APP (_-amyloid), ARCN1, |
| | ARHGAP35, ARL3, ASAH1, ASPH (A-10), ATP1B1, ATP1B3, ATP5I, ATP5O, ATXN1, |
| | B7H3, BACE1, BAI3, BAIAP2, BCA-200, BDNF, BigH3, BIRC2, BLVRB, BRCA, BST2, |
| | C1GALT1, C1GALT1C1, C20orf3, CA125, CACYBP, Calmodulin, CAPN1, CAPNS1, |
| | CCDC64B, CCL2 (MCP-1), CCT3, CD10(BD), CD127 (IL7R), CD174, CD24, CD44, |
| | CD80, CD86, CDH1, CDH5, CEA, CFL2, CHCHD3, CHMP3, CHRDL2, CIB1, CKAP4, |
| | COPA, COX5B, CRABP2, CRIP1, CRISPLD1, CRMP-2, CRTAP, CTLA4, CUL3, CXCR3, |
| | CXCR4, CXCR6, CYB5B, CYB5R1, CYCS, CYFRA 21, DBI, DDX23, DDX39B, derlin 1, |
| | DHCR7, DHX9, DLD, DLL4, DNAJB1, DPP6, DSTN, eCadherin, EEF1D, EEF2, EFTUD2, |
| | EIF4A2, EIF4A3, EpCaM, EphA2, ER(1) ESR1_, ER(2) ESR2_, Erb B4, Erb2, erb3 (Erb- |
| | B3?), ERLIN2, ESD, FARSA, FASN, FEN1, FKBP5, FLNB, FOXP3, FUS, Gal3, GCDPF- |
| | 15, GCNT2, GNA12, GNG5, GNPTG, GPC6, GPD2, GPER (GPR30), GSPT1, H3F3B, |
| | H3F3C, HADH, HAP1, HER3, HIST1H1C, HIST1H2AB, HIST1H3A, HIST1H3C, |
| | HIST1H3D, HIST1H3E, HIST1H3F, HIST1H3G, HIST1H3H, HIST1H3I, HIST1H3J, |
| | HIST2H2BF, HIST2H3A, HIST2H3C, HIST2H3D, HIST3H3, HMGB1, HNRNPA2B1, |
| | HNRNPAB, HNRNPC, HNRNPD, HNRNPH2, HNRNPK, HNRNPL, HNRNPM, |
| | HNRNPU, HPS3, HSP-27, HSP70, HSP90B1, HSPA1A, HSPA2, HSPA9, HSPE1, IC3b, |
| | IDE, IDH3B, IDO1, IFI30, IL1RL2, IL7, IL8, ILF2, ILF3, IQCG, ISOC2, IST1, ITGA7, |
| | ITGB7, junction plakoglobin, Keratin 15, KRAS, KRT19, KRT2, KRT7, KRT8, KRT9, |
| | KTN1, LAMP1, LMNA, LMNB1, LNPEP, LRPPRC, LRRC57, Mammaglobin, MAN1A1, |
| | MAN1A2, MART1, MATR3, MBD5, MCT2, MDH2, MFGE8, MFGE8, MGP, MMP9, |
| | MRP8, MUC1, MUC17, MUC2, MYO5B, MYOF, NAPA, NCAM, NCL, NG2 (CSPG4), |
| | Ngal, NHE-3, NME2, NONO, NPM1, NQO1, NT5E (CD73), ODC1, OPG, OPN (SC), OS9, |
| | p53, PACSIN3, PAICS, PARK7, PARVA, PC, PCNA, PCSA, PD-1, PD-L1, PD-L2, |
| | PGP9.5, PHB, PHB2, PIK3C2B, PKP3, PPL, PR(B)?, PRDX2, PRKCB, PRKCD, PRKDC, |
| | PSA, PSAP, PSMA, PSMB7, PSMD2, PSME3, PYCARD, RAB1A, RAB3D, RAB7A, |
| | RAGE, RBL2, RNPEP, RPL14, RPL27, RPL36, RPS25, RPS4X, RPS4Y1, RPS4Y2, |
| | RUVBL2, SET, SHMT2, SLAIN1, SLC39A14, SLC9A3R2, SMARCA4, SNRPD2, |
| | SNRPD3, SNX33, SNX9, SPEN, SPR, SQSTM1, SSBP1, ST3GAL1, STXBP4, SUB1, |
| | SUCLG2, Survivin, SYT9, TFF3 (secreted), TGOLN2, THBS1, TIMP1, TIMP2, TMED10, |
| | TMED4, TMED9, TMEM211, TOM1, TRAF4 (scaffolding), TRAIL-R2, TRAP1, TrkB, Tsg |
| | 101, TXNDC16, U2AF2, UEVLD, UFC1, UNC93a, USP14, VASP, VCP, VDAC1, VEGFA, |
| | VEGFR1, VEGFR2, VPS37C, WIZ, XRCC5, XRCC6, YB-1, YWHAZ |
| Lung cancer | Pgrmc1 (progesterone receptor membrane component 1)/sigma-2 receptor, STEAP, EZH2 |
| Lung cancer | Prohibitin, CD23, Amylin Peptide, HRP, Rad51, Pax-5, Oct-3/, GLUT-1, PSCA, |
| | Thrombospondin, FHIT, a-B-Crystallin, LewisA, Vacular Endothelial Growth |
| | Factor(VEGF), Hepatocyte Factor Homologue-4, Flt-4, GluR6/7, Prostate Apoptosis |
| | Response Protein-4, GluR1, Fli-1, Urocortin, S100A4, 14-3-3 beta, P504S, HDAC1, PGP9.5, |
| | DJ-1, COX2, MMP-19, Actin, skeletal muscle, Claudin 3, Cadherin-P, Collagen IX, |
| | p27Kip1, Cathepsin D, CD30 (Reed-Sternberg Cell Marker), Ubiquitin, FSH-b, TrxR2, |
| | CCK-8, Cyclin C, CD138, TGF-beta 2, Adrenocorticotrophic Hormone, PPAR-gamma, Bcl- |
| | 6, GLUT-3, IGF-I, mRANKL, Fas-ligand, Filamin, Calretinin, Oct-1, Parathyroid Hormone, |
| | Claudin 5, Claudin 4, Raf-1 (Phospho-specific), CDC14A Phosphatase, Mitochondria, APC, |
| | Gastrin 1, Ku (p80), Gai1, XPA, Maltose Binding Protein, Melanoma (gp100), |
| | Phosphotyrosine, Amyloid A, CXCR4/Fusin, Hepatic Nuclear Factor-3B, Caspase 1, HPV |
| | 16-E7, Axonal Growth Cones, Lck, Ornithine Decarboxylase, Gamma Glutamylcysteine |
| | Synthetase(GCS)/Glutamate-cysteine Ligase, ERCC1, Calmodulin, Caspase 7 (Mch 3), |
| | CD137 (4-1BB), Nitric Oxide Synthase, brain (bNOS), E2F-2, IL-10R, L-Plastin, CD18, |
| | Vimentin, CD50/ICAM-3, Superoxide Dismutase, Adenovirus Type 5 E1A, PHAS-I, |
| | Progesterone Receptor (phospho-specific) - Serine 294, MHC II (HLA-DQ), XPG, ER Ca + 2 |
| | ATPase2, Laminin-s, E3-binding protein (ARM1), CD45RO, CD1, Cdk2, MMP-10 |
| | (Stromilysin-2), sm, Surfactant Protein B (Pro), Apolipoprotein D, CD46, Keratin 8 |
| | (phospho-specific Ser73), PCNA, PLAP, CD20, Syk, LH, Keratin 19, ADP-ribosylation |
| | Factor (ARF-6), Int-2 Oncoprotein, Luciferase, AIF (Apoptosis Inducing Factor), Grb2, bcl- |
| | X, CD16, Paxillin, MHC II (HLA-DP and DR), B-Cell, p21WAF1, MHC II (HLA-DR), |
| | Tyrosinase, E2F-1, Pds1, Calponin, Notch, CD26/DPP IV, SV40 Large T Antigen, Ku |
| | (p70/p80), Perforin, XPF, SIM Ag (SIMA-4D3), Cdk1/p34cdc2, Neuron Specific Enolase, b- |
| | 2-Microglobulin, DNA Polymerase Beta, Thyroid Hormone Receptor, Human, Alkaline |
| | Phosphatase (AP), Plasma Cell Marker, Heat Shock Protein 70/hsp70, TRP75/gp75, SRF |
| | (Serum Response Factor), Laminin B1/b1, Mast Cell Chymase, Caldesmon, CEA/CD66e, |
| | CD24, Retinoid X Receptor (hRXR), CD45/T200/LCA, Rabies Virus, Cytochrome c, DR3, |
| | bcl-XL, Fascin, CD71/Transferrin Receptor |
| Lung Cancer | miR-497 |
| Lung Cancer | Pgrmc1 |
| Ovarian Cancer | CA-125, CA 19-9, c-reactive protein, CD95(also called Fas, Fas antigen, Fas receptor, FasR, |
| | TNFRSF6, APT1 or APO-1), FAP-1, miR-200 microRNAs, EGFR, EGFRvIII, |
| | apolipoprotein AI, apolipoprotein CIII, myoglobin, tenascin C, MSH6, claudin-3, claudin-4, |
| | caveolin-1, coagulation factor III, CD9, CD36, CD37, CD53, CD63, CD81, CD136, CD147, |
| | Hsp70, Hsp90, Rab13, Desmocollin-1, EMP-2, CK7, CK20, GCDF15, CD82, Rab-5b, |
| | Annexin V, MFG-E8, HLA-DR. MiR-200 microRNAs (miR-200a, miR-200b, miR-200c), |
| | miR-141, miR-429, JNK, Jun |
| Prostate Cancer v | AQP2, BMP5, C16orf86, CXCL13, DST, ERCC1, GNAO1, KLHL5, MAP4K1, NELL2, |
| normal | PENK, PGF, POU3F1, PRSS21, SCML1, SEMG1, SMARCD3, SNAI2, TAF1C, TNNT3 |
| Prostate Cancer v | ADRB2, ARG2, C22orf32, CYorf14, EIF1AY, FEV, KLK2, KLK4, LRRC26, MAOA, |
| Breast Cancer | NLGN4Y, PNPLA7, PVRL3, SIM2, SLC30A4, SLC45A3, STX19, TRIM36, TRPM8 |
| Prostate Cancer v | ADRB2, BAIAP2L2, C19orf33, CDX1, CEACAM6, EEF1A2, ERN2, FAM110B, FOXA2, |
| Colorectal Cancer | KLK2, KLK4, LOC389816, LRRC26, MIPOL1, SLC45A3, SPDEF, TRIM31, TRIM36, |
| | ZNF613 |
| Prostate Cancer v | ASTN2, CAB39L, CRIP1, FAM110B, FEV, GSTP1, KLK2, KLK4, LOC389816, LRRC26, |
| Lung Cancer | MUC1, PNPLA7, SIM2, SLC45A3, SPDEF, TRIM36, TRPV6, ZNF613 |
| Prostate Cancer | miRs-26a + b, miR-15, miR-16, miR-195, miR-497, miR-424, miR-206, miR-342-5p, miR- |
| | 186, miR-1271, miR-600, miR-216b, miR-519 family, miR-203 |
| Integrins | ITGA1 (CD49a, VLA1), ITGA2 (CD49b, VLA2), ITGA3 (CD49c, VLA3), ITGA4 (CD49d, |
| | VLA4), ITGA5 (CD49e, VLA5), ITGA6 (CD49f, VLA6), ITGA7 (FLJ25220), ITGA8, |
| | ITGA9 (RLC), ITGA10, ITGA11 (HsT18964), ITGAD (CD11D, FLJ39841), ITGAE |
| | (CD103, HUMINAE), ITGAL (CD11a, LFA1A), ITGAM (CD11b, MAC-1), ITGAV |
| | (CD51, VNRA, MSK8), ITGAW, ITGAX (CD11c), ITGB1 (CD29, FNRB, MSK12, |
| | MDF20), ITGB2 (CD18, LFA-1, MAC-1, MFI7), ITGB3 (CD61, GP3A, GPIIIa), ITGB4 |
| | (CD104), ITGB5 (FLJ26658), ITGB6, ITGB7, ITGB8 |
| Glycoprotein | GpIa-IIa, GpIIb-IIIa, GpIIIb, GpIb, GpIX |
| Transcription | STAT3, EZH2, p53, MACC1, SPDEF, RUNX2, YB-1 |
| factors | |
| Kinases | AURKA, AURKB |
| Disease Markers | 6Ckine, Adiponectin, Adrenocorticotropic Hormone, Agouti-Related Protein, Aldose |
| | Reductase, Alpha-1-Antichymotrypsin, Alpha-1-Antitrypsin, Alpha-1-Microglobulin, Alpha- |
| | 2-Macroglobulin, Alpha-Fetoprotein, Amphiregulin, Angiogenin, Angiopoietin-2, |
| | Angiotensin-Converting Enzyme, Angiotensinogen, Annexin A1, Apolipoprotein A-I, |
| | Apolipoprotein A-II, Apolipoprotein A-IV, Apolipoprotein B, Apolipoprotein C-I, |
| | Apolipoprotein C-III, Apolipoprotein D, Apolipoprotein E, Apolipoprotein H, |
| | Apolipoprotein(a), AXL Receptor Tyrosine Kinase, B cell-activating Factor, B Lymphocyte |
| | Chemoattractant, Bcl-2-like protein 2, Beta-2-Microglobulin, Betacellulin, Bone |
| | Morphogenetic Protein 6, Brain-Derived Neurotrophic Factor, Calbindin, Calcitonin, Cancer |
| | Antigen 125, Cancer Antigen 15-3, Cancer Antigen 19-9, Cancer Antigen 72-4, |
| | Carcinoembryonic Antigen, Cathepsin D, CD 40 antigen, CD40 Ligand, CD5 Antigen-like, |
| | Cellular Fibronectin, Chemokine CC-4, Chromogranin-A, Ciliary Neurotrophic Factor, |
| | Clusterin, Collagen IV, Complement C3, Complement Factor H, Connective Tissue Growth |
| | Factor, Cortisol, C-Peptide, C-Reactive Protein, Creatine Kinase-MB, Cystatin-C, Endoglin, |
| | Endostatin, Endothelin-1, EN-RAGE, Eotaxin-1, Eotaxin-2, Eotaxin-3, Epidermal Growth |
| | Factor, Epiregulin, Epithelial cell adhesion molecule, Epithelial-Derived Neutrophil- |
| | Activating Protein 78, Erythropoietin, E-Selectin, Ezrin, Factor VII, Fas Ligand, FASLG |
| | Receptor, Fatty Acid-Binding Protein (adipocyte), Fatty Acid-Binding Protein (heart), Fatty |
| | Acid-Binding Protein (liver), Ferritin, Fetuin-A, Fibrinogen, Fibroblast Growth Factor 4, |
| | Fibroblast Growth Factor basic, Fibulin-1C, Follicle-Stimulating Hormone, Galectin-3, |
| | Gelsolin, Glucagon, Glucagon-like Peptide 1, Glucose-6-phosphate Isomerase, Glutamate- |
| | Cysteine Ligase Regulatory subunit, Glutathione S-Transferase alpha, Glutathione S- |
| | Transferase Mu 1, Granulocyte Colony-Stimulating Factor, Granulocyte-Macrophage |
| | Colony-Stimulating Factor, Growth Hormone, Growth-Regulated alpha protein, Haptoglobin, |
| | HE4, Heat Shock Protein 60, Heparin-Binding EGF-Like Growth Factor, Hepatocyte Growth |
| | Factor, Hepatocyte Growth Factor Receptor, Hepsin, Human Chorionic Gonadotropin beta, |
| | Human Epidermal Growth Factor Receptor 2, Immunoglobulin A, Immunoglobulin E, |
| | Immunoglobulin M, Insulin, Insulin-like Growth Factor I, Insulin-like Growth Factor- |
| | Binding Protein 1, Insulin-like Growth Factor-Binding Protein 2, Insulin-like Growth Factor- |
| | Binding Protein 3, Insulin-like Growth Factor Binding Protein 4, Insulin-like Growth Factor |
| | Binding Protein 5, Insulin-like Growth Factor Binding Protein 6, Intercellular Adhesion |
| | Molecule 1, Interferon gamma, Interferon gamma Induced Protein 10, Interferon-inducible T- |
| | cell alpha chemoattractant, Interleukin-1 alpha, Interleukin-1 beta, Interleukin-1 Receptor |
| | antagonist, Interleukin-2, Interleukin-2 Receptor alpha, Interleukin-3, Interleukin-4, |
| | Interleukin-5, Interleukin-6, Interleukin-6 Receptor, Interleukin-6 Receptor subunit beta, |
| | Interleukin-7, Interleukin-8, Interleukin-10, Interleukin-11, Interleukin-12 Subunit p40, |
| | Interleukin-12 Subunit p70, Interleukin-13, Interleukin-15, Interleukin-16, Interleukin-25, |
| | Kallikrein 5, Kallikrein-7, Kidney Injury Molecule-1, Lactoylglutathione lyase, Latency- |
| | Associated Peptide of Transforming Growth Factor beta 1, Lectin-Like Oxidized LDL |
| | Receptor 1, Leptin, Luteinizing Hormone, Lymphotactin, Macrophage Colony-Stimulating |
| | Factor 1, Macrophage Inflammatory Protein-1 alpha, Macrophage Inflammatory Protein-1 |
| | beta, Macrophage Inflammatory Protein-3 alpha, Macrophage inflammatory protein 3 beta, |
| | Macrophage Migration Inhibitory Factor, Macrophage-Derived Chemokine, Macrophage- |
| | Stimulating Protein, Malondialdehyde-Modified Low-Density Lipoprotein, Maspin, Matrix |
| | Metalloproteinase-1, Matrix Metalloproteinase-2, Matrix Metalloproteinase-3, Matrix |
| | Metalloproteinase-7, Matrix Metalloproteinase-9, Matrix Metalloproteinase-9, Matrix |
| | Metalloproteinase-10, Mesothelin, MHC class I chain-related protein A, Monocyte |
| | Chemotactic Protein 1, Monocyte Chemotactic Protein 2, Monocyte Chemotactic Protein 3, |
| | Monocyte Chemotactic Protein 4, Monokine Induced by Gamma Interferon, Myeloid |
| | Progenitor Inhibitory Factor 1, Myeloperoxidase, Myoglobin, Nerve Growth Factor beta, |
| | Neuronal Cell Adhesion Molecule, Neuron-Specific Enolase, Neuropilin-1, Neutrophil |
| | Gelatinase-Associated Lipocalin, NT-proBNP, Nucleoside diphosphate kinase B, |
| | Osteopontin, Osteoprotegerin, Pancreatic Polypeptide, Pepsinogen I, Peptide YY, |
| | Peroxiredoxin-4, Phosphoserine Aminotransferase, Placenta Growth Factor, Plasminogen |
| | Activator Inhibitor 1, Platelet-Derived Growth Factor BB, Pregnancy-Associated Plasma |
| | Protein A, Progesterone, Proinsulin (inc. Total or Intact), Prolactin, Prostasin, Prostate- |
| | Specific Antigen (inc. Free PSA), Prostatic Acid Phosphatase, Protein S100-A4, Protein |
| | S100-A6, Pulmonary and Activation-Regulated Chemokine, Receptor for advanced |
| | glycosylation end products, Receptor tyrosine-protein kinase erbB-3, Resistin, S100 calcium- |
| | binding protein B, Secretin, Serotransferrin, Serum Amyloid P-Component, Serum Glutamic |
| | Oxaloacetic Transaminase, Sex Hormone-Binding Globulin, Sortilin, Squamous Cell |
| | Carcinoma Antigen-1, Stem Cell Factor, Stromal cell-derived Factor-1, Superoxide |
| | Dismutase 1 (soluble), T Lymphocyte-Secreted Protein I-309, Tamm-Horsfall Urinary |
| | Glycoprotein, T-Cell-Specific Protein RANTES, Tenascin-C, Testosterone, Tetranectin, |
| | Thrombomodulin, Thrombopoietin, Thrombospondin-1, Thyroglobulin, Thyroid-Stimulating |
| | Hormone, Thyroxine-Binding Globulin, Tissue Factor, Tissue Inhibitor of Metalloproteinases |
| | 1, Tissue type Plasminogen activator, TNF-Related Apoptosis-Inducing Ligand Receptor 3, |
| | Transforming Growth Factor alpha, Transforming Growth Factor beta-3, Transthyretin, |
| | Trefoil Factor 3, Tumor Necrosis Factor alpha, Tumor Necrosis Factor beta, Tumor Necrosis |
| | Factor Receptor I, Tumor necrosis Factor Receptor 2, Tyrosine kinase with Ig and EGF |
| | homology domains 2, Urokinase-type Plasminogen Activator, Urokinase-type plasminogen |
| | activator Receptor, Vascular Cell Adhesion Molecule-1, Vascular Endothelial Growth Factor, |
| | Vascular endothelial growth Factor B, Vascular Endothelial Growth Factor C, Vascular |
| | endothelial growth Factor D, Vascular Endothelial Growth Factor Receptor 1, Vascular |
| | Endothelial Growth Factor Receptor 2, Vascular endothelial growth Factor Receptor 3, |
| | Vitamin K-Dependent Protein S, Vitronectin, von Willebrand Factor, YKL-40 |
| Disease Markers | Adiponectin, Adrenocorticotropic Hormone, Agouti-Related Protein, Alpha-1- |
| | Antichymotrypsin, Alpha-1-Antitrypsin, Alpha-1-Microglobulin, Alpha-2-Macroglobulin, |
| | Alpha-Fetoprotein, Amphiregulin, Angiopoietin-2, Angiotensin-Converting Enzyme, |
| | Angiotensinogen, Apolipoprotein A-I, Apolipoprotein A-II, Apolipoprotein A-IV, |
| | Apolipoprotein B, Apolipoprotein C-I, Apolipoprotein C-III, Apolipoprotein D, |
| | Apolipoprotein E, Apolipoprotein H, Apolipoprotein(a), AXL Receptor Tyrosine Kinase, B |
| | Lymphocyte Chemoattractant, Beta-2-Microglobulin, Betacellulin, Bone Morphogenetic |
| | Protein 6, Brain-Derived Neurotrophic Factor, Calbindin, Calcitonin, Cancer Antigen 125, |
| | Cancer Antigen 19-9, Carcinoembryonic Antigen, CD 40 antigen, CD40 Ligand, CD5 |
| | Antigen-like, Chemokine CC-4, Chromogranin-A, Ciliary Neurotrophic Factor, Clusterin, |
| | Complement C3, Complement Factor H, Connective Tissue Growth Factor, Cortisol, C- |
| | Peptide, C-Reactive Protein, Creatine Kinase-MB, Cystatin-C, Endothelin-1, EN-RAGE, |
| | Eotaxin-1, Eotaxin-3, Epidermal Growth Factor, Epiregulin, Epithelial-Derived Neutrophil- |
| | Activating Protein 78, Erythropoietin, E-Selectin, Factor VII, Fas Ligand, FASLG Receptor, |
| | Fatty Acid-Binding Protein (heart), Ferritin, Fetuin-A, Fibrinogen, Fibroblast Growth Factor |
| | 4, Fibroblast Growth Factor basic, Follicle-Stimulating Hormone, Glucagon, Glucagon-like |
| | Peptide 1, Glutathione S-Transferase alpha, Granulocyte Colony-Stimulating Factor, |
| | Granulocyte-Macrophage Colony-Stimulating Factor, Growth Hormone, Growth-Regulated |
| | alpha protein, Haptoglobin, Heat Shock Protein 60, Heparin-Binding EGF-Like Growth |
| | Factor, Hepatocyte Growth Factor, Immunoglobulin A, Immunoglobulin E, Immunoglobulin |
| | M, Insulin, Insulin-like Growth Factor I, Insulin-like Growth Factor-Binding Protein 2, |
| | Intercellular Adhesion Molecule 1, Interferon gamma, Interferon gamma Induced Protein 10, |
| | Interleukin-1 alpha, Interleukin-1 beta, Interleukin-1 Receptor antagonist, Interleukin-2, |
| | Interleukin-3, Interleukin-4, Interleukin-5, Interleukin-6, Interleukin-6 Receptor, Interleukin- |
| | 7, Interleukin-8, Interleukin-10, Interleukin-11, Interleukin-12 Subunit p40, Interleukin-12 |
| | Subunit p70, Interleukin-13, Interleukin-15, Interleukin-16, Interleukin-25, Kidney Injury |
| | Molecule-1, Lectin-Like Oxidized LDL Receptor 1, Leptin, Luteinizing Hormone, |
| | Lymphotactin, Macrophage Colony-Stimulating Factor 1, Macrophage Inflammatory Protein- |
| | 1 alpha, Macrophage Inflammatory Protein-1 beta, Macrophage Inflammatory Protein-3 |
| | alpha, Macrophage Migration Inhibitory Factor, Macrophage-Derived Chemokine, |
| | Malondialdehyde-Modified Low-Density Lipoprotein, Matrix Metalloproteinase-1, Matrix |
| | Metalloproteinase-2, Matrix Metalloproteinase-3, Matrix Metalloproteinase-7, Matrix |
| | Metalloproteinase-9, Matrix Metalloproteinase-9, Matrix Metalloproteinase-10, Monocyte |
| | Chemotactic Protein 1, Monocyte Chemotactic Protein 2, Monocyte Chemotactic Protein 3, |
| | Monocyte Chemotactic Protein 4, Monokine Induced by Gamma Interferon, Myeloid |
| | Progenitor Inhibitory Factor 1, Myeloperoxidase, Myoglobin, Nerve Growth Factor beta, |
| | Neuronal Cell Adhesion Molecule, Neutrophil Gelatinase-Associated Lipocalin, NT-proBNP, |
| | Osteopontin, Pancreatic Polypeptide, Peptide YY, Placenta Growth Factor, Plasminogen |
| | Activator Inhibitor 1, Platelet-Derived Growth Factor BB, Pregnancy-Associated Plasma |
| | Protein A, Progesterone, Proinsulin (inc. Intact or Total), Prolactin, Prostate-Specific Antigen |
| | (inc. Free PSA), Prostatic Acid Phosphatase, Pulmonary and Activation-Regulated |
| | Chemokine, Receptor for advanced glycosylation end products, Resistin, S100 calcium- |
| | binding protein B, Secretin, Serotransferrin, Serum Amyloid P-Component, Serum Glutamic |
| | Oxaloacetic Transaminase, Sex Hormone-Binding Globulin, Sortilin, Stem Cell Factor, |
| | Superoxide Dismutase 1 (soluble), T Lymphocyte-Secreted Protein I-309, Tamm-Horsfall |
| | Urinary Glycoprotein, T-Cell-Specific Protein RANTES, Tenascin-C, Testosterone, |
| | Thrombomodulin, Thrombopoietin, Thrombospondin-1, Thyroid-Stimulating Hormone, |
| | Thyroxine-Binding Globulin, Tissue Factor, Tissue Inhibitor of Metalloproteinases 1, TNF- |
| | Related Apoptosis-Inducing Ligand Receptor 3, Transforming Growth Factor alpha, |
| | Transforming Growth Factor beta-3, Transthyretin, Trefoil Factor 3, Tumor Necrosis Factor |
| | alpha, Tumor Necrosis Factor beta, Tumor necrosis Factor Receptor 2, Vascular Cell |
| | Adhesion Molecule-1, Vascular Endothelial Growth Factor, Vitamin K-Dependent Protein S, |
| | Vitronectin, von Willebrand Factor |
| Oncology | 6Ckine, Aldose Reductase, Alpha-Fetoprotein, Amphiregulin, Angiogenin, Annexin A1, B |
| | cell-activating Factor, B Lymphocyte Chemoattractant, Bcl-2-like protein 2, Betacellulin, |
| | Cancer Antigen 125, Cancer Antigen 15-3, Cancer Antigen 19-9, Cancer Antigen 72-4, |
| | Carcinoembryonic Antigen, Cathepsin D, Cellular Fibronectin, Collagen IV, Endoglin, |
| | Endostatin, Eotaxin-2, Epidermal Growth Factor, Epiregulin, Epithelial cell adhesion |
| | molecule, Ezrin, Fatty Acid-Binding Protein (adipocyte), Fatty Acid-Binding Protein (liver), |
| | Fibroblast Growth Factor basic, Fibulin-1C, Galectin-3, Gelsolin, Glucose-6-phosphate |
| | Isomerase, Glutamate-Cysteine Ligase Regulatory subunit, Glutathione S-Transferase Mu 1, |
| | HE4, Heparin-Binding EGF-Like Growth Factor, Hepatocyte Growth Factor, Hepatocyte |
| | Growth Factor Receptor, Hepsin, Human Chorionic Gonadotropin beta, Human Epidermal |
| | Growth Factor Receptor 2, Insulin-like Growth Factor-Binding Protein 1, Insulin-like Growth |
| | Factor-Binding Protein 2, Insulin-like Growth Factor-Binding Protein 3, Insulin-like Growth |
| | Factor Binding Protein 4, Insulin-like Growth Factor Binding Protein 5, Insulin-like Growth |
| | Factor Binding Protein 6, Interferon gamma Induced Protein 10, Interferon-inducible T-cell |
| | alpha chemoattractant, Interleukin-2 Receptor alpha, Interleukin-6, Interleukin-6 Receptor |
| | subunit beta, Kallikrein 5, Kallikrein-7, Lactoylglutathione lyase, Latency-Associated Peptide |
| | of Transforming Growth Factor beta 1, Leptin, Macrophage inflammatory protein 3 beta, |
| | Macrophage Migration Inhibitory Factor, Macrophage-Stimulating Protein, Maspin, Matrix |
| | Metalloproteinase-2, Mesothelin, MHC class I chain-related protein A, Monocyte |
| | Chemotactic Protein 1, Monokine Induced by Gamma Interferon, Neuron-Specific Enolase, |
| | Neuropilin-1, Neutrophil Gelatinase-Associated Lipocalin, Nucleoside diphosphate kinase B, |
| | Osteopontin, Osteoprotegerin, Pepsinogen I, Peroxiredoxin-4, Phosphoserine |
| | Aminotransferase, Placenta Growth Factor, Platelet-Derived Growth Factor BB, Prostasin, |
| | Protein S100-A4, Protein S100-A6, Receptor tyrosine-protein kinase erbB-3, Squamous Cell |
| | Carcinoma Antigen-1, Stromal cell-derived Factor-1, Tenascin-C, Tetranectin, |
| | Thyroglobulin, Tissue type Plasminogen activator, Transforming Growth Factor alpha, |
| | Tumor Necrosis Factor Receptor I, Tyrosine kinase with Ig and EGF homology domains 2, |
| | Urokinase-type Plasminogen Activator, Urokinase-type plasminogen activator Receptor, |
| | Vascular Endothelial Growth Factor, Vascular endothelial growth Factor B, Vascular |
| | Endothelial Growth Factor C, Vascular endothelial growth Factor D, Vascular Endothelial |
| | Growth Factor Receptor 1, Vascular Endothelial Growth Factor Receptor 2, Vascular |
| | endothelial growth Factor Receptor 3, YKL-40 |
| Disease | Adiponectin, Alpha-1-Antitrypsin, Alpha-2-Macroglobulin, Alpha-Fetoprotein, |
| | Apolipoprotein A-I, Apolipoprotein C-III, Apolipoprotein H, Apolipoprotein(a), Beta-2- |
| | Microglobulin, Brain-Derived Neurotrophic Factor, Calcitonin, Cancer Antigen 125, Cancer |
| | Antigen 19-9, Carcinoembryonic Antigen, CD 40 antigen, CD40 Ligand, Complement C3, C- |
| | Reactive Protein, Creatine Kinase-MB, Endothelin-1, EN-RAGE, Eotaxin-1, Epidermal |
| | Growth Factor, Epithelial-Derived Neutrophil-Activating Protein 78, Erythropoietin, Factor |
| | VII, Fatty Acid-Binding Protein (heart), Ferritin, Fibrinogen, Fibroblast Growth Factor basic, |
| | Granulocyte Colony-Stimulating Factor, Granulocyte-Macrophage Colony-Stimulating |
| | Factor, Growth Hormone, Haptoglobin, Immunoglobulin A, Immunoglobulin E, |
| | Immunoglobulin M, Insulin, Insulin-like Growth Factor I, Intercellular Adhesion Molecule 1, |
| | Interferon gamma, Interleukin-1 alpha, Interleukin-1 beta, Interleukin-1 Receptor antagonist, |
| | Interleukin-2, Interleukin-3, Interleukin-4, Interleukin-5, Interleukin-6, Interleukin-7, |
| | Interleukin-8, Interleukin-10, Interleukin-12 Subunit p40, Interleukin-12 Subunit p70, |
| | Interleukin-13, Interleukin-15, Interleukin-16, Leptin, Lymphotactin, Macrophage |
| | Inflammatory Protein-1 alpha, Macrophage Inflammatory Protein-1 beta, Macrophage- |
| | Derived Chemokine, Matrix Metalloproteinase-2, Matrix Metalloproteinase-3, Matrix |
| | Metalloproteinase-9, Monocyte Chemotactic Protein 1, Myeloperoxidase, Myoglobin, |
| | Plasminogen Activator Inhibitor 1, Pregnancy-Associated Plasma Protein A, Prostate- |
| | Specific Antigen (inc. Free PSA), Prostatic Acid Phosphatase, Serum Amyloid P-Component, |
| | Serum Glutamic Oxaloacetic Transaminase, Sex Hormone-Binding Globulin, Stem Cell |
| | Factor, T-Cell-Specific Protein RANTES, Thrombopoietin, Thyroid-Stimulating Hormone, |
| | Thyroxine-Binding Globulin, Tissue Factor, Tissue Inhibitor of Metalloproteinases 1, Tumor |
| | Necrosis Factor alpha, Tumor Necrosis Factor beta, Tumor Necrosis Factor Receptor 2, |
| | Vascular Cell Adhesion Molecule-1, Vascular Endothelial Growth Factor, von Willebrand |
| | Factor |
| Neurological | Alpha-1-Antitrypsin, Apolipoprotein A-I, Apolipoprotein A-II, Apolipoprotein B, |
| | Apolipoprotein C-I, Apolipoprotein H, Beta-2-Microglobulin, Betacellulin, Brain-Derived |
| | Neurotrophic Factor, Calbindin, Cancer Antigen 125, Carcinoembryonic Antigen, CD5 |
| | Antigen-like, Complement C3, Connective Tissue Growth Factor, Cortisol, Endothelin-1, |
| | Epidermal Growth Factor Receptor, Ferritin, Fetuin-A, Follicle-Stimulating Hormone, |
| | Haptoglobin, Immunoglobulin A, Immunoglobulin M, Intercellular Adhesion Molecule 1, |
| | Interleukin-6 Receptor, Interleukin-7, Interleukin-10, Interleukin-11, Interleukin-17, Kidney |
| | Injury Molecule-1, Luteinizing Hormone, Macrophage-Derived Chemokine, Macrophage |
| | Migration Inhibitory Factor, Macrophage Inflammatory Protein-1 alpha, Matrix |
| | Metalloproteinase-2, Monocyte Chemotactic Protein 2, Peptide YY, Prolactin, Prostatic Acid |
| | Phosphatase, Serotransferrin, Serum Amyloid P-Component, Sortilin, Testosterone, |
| | Thrombopoietin, Thyroid-Stimulating Hormone, Tissue Inhibitor of Metalloproteinases 1, |
| | TNF-Related Apoptosis-Inducing Ligand Receptor 3, Tumor necrosis Factor Receptor 2, |
| | Vascular Endothelial Growth Factor, Vitronectin |
| Cardiovascular | Adiponectin, Apolipoprotein A-I, Apolipoprotein B, Apolipoprotein C-III, Apolipoprotein D, |
| | Apolipoprotein E, Apolipoprotein H, Apolipoprotein(a), Clusterin, C-Reactive Protein, |
| | Cystatin-C, EN-RAGE, E-Selectin, Fatty Acid-Binding Protein (heart), Ferritin, Fibrinogen, |
| | Haptoglobin, Immunoglobulin M, Intercellular Adhesion Molecule 1, Interleukin-6, |
| | Interleukin-8, Lectin-Like Oxidized LDL Receptor 1, Leptin, Macrophage Inflammatory |
| | Protein-1 alpha, Macrophage Inflammatory Protein-1 beta, Malondialdehyde-Modified Low- |
| | Density Lipoprotein, Matrix Metalloproteinase-1, Matrix Metalloproteinase-10, Matrix |
| | Metalloproteinase-2, Matrix Metalloproteinase-3, Matrix Metalloproteinase-7, Matrix |
| | Metalloproteinase-9, Monocyte Chemotactic Protein 1, Myeloperoxidase, Myoglobin, NT- |
| | proBNP, Osteopontin, Plasminogen Activator Inhibitor 1, P-Selectin, Receptor for advanced |
| | glycosylation end products, Serum Amyloid P-Component, Sex Hormone-Binding Globulin, |
| | T-Cell-Specific Protein RANTES, Thrombomodulin, Thyroxine-Binding Globulin, Tissue |
| | Inhibitor of Metalloproteinases 1, Tumor Necrosis Factor alpha, Tumor necrosis Factor |
| | Receptor 2, Vascular Cell Adhesion Molecule-1, von Willebrand Factor |
| Inflammatory | Alpha-1-Antitrypsin, Alpha-2-Macroglobulin, Beta-2-Microglobulin, Brain-Derived |
| | Neurotrophic Factor, Complement C3, C-Reactive Protein, Eotaxin-1, Factor VII, Ferritin, |
| | Fibrinogen, Granulocyte-Macrophage Colony-Stimulating Factor, Haptoglobin, Intercellular |
| | Adhesion Molecule 1, Interferon gamma, Interleukin-1 alpha, Interleukin-1 beta, Interleukin- |
| | 1 Receptor antagonist, Interleukin-2, Interleukin-3, Interleukin-4, Interleukin-5, Interleukin-6, |
| | Interleukin-7, Interleukin-8, Interleukin-10, Interleukin-12 Subunit p40, Interleukin-12 |
| | Subunit p70, Interleukin-15, Interleukin-17, Interleukin-23, Macrophage Inflammatory |
| | Protein-1 alpha, Macrophage Inflammatory Protein-1 beta, Matrix Metalloproteinase-2, |
| | Matrix Metalloproteinase-3, Matrix Metalloproteinase-9, Monocyte Chemotactic Protein 1, |
| | Stem Cell Factor, T-Cell-Specific Protein RANTES, Tissue Inhibitor of Metalloproteinases 1, |
| | Tumor Necrosis Factor alpha, Tumor Necrosis Factor beta, Tumor necrosis Factor Receptor |
| | 2, Vascular Cell Adhesion Molecule-1, Vascular Endothelial Growth Factor, Vitamin D- |
| | Binding Protein, von Willebrand Factor |
| Metabolic | Adiponectin, Adrenocorticotropic Hormone, Angiotensin-Converting Enzyme, |
| | Angiotensinogen, Complement C3 alpha des arg, Cortisol, Follicle-Stimulating Hormone, |
| | Galanin, Glucagon, Glucagon-like Peptide 1, Insulin, Insulin-like Growth Factor I, Leptin, |
| | Luteinizing Hormone, Pancreatic Polypeptide, Peptide YY, Progesterone, Prolactin, Resistin, |
| | Secretin, Testosterone |
| Kidney | Alpha-1-Microglobulin, Beta-2-Microglobulin, Calbindin, Clusterin, Connective Tissue |
| | Growth Factor, Creatinine, Cystatin-C, Glutathione S-Transferase alpha, Kidney Injury |
| | Molecule-1, Microalbumin, Neutrophil Gelatinase-Associated Lipocalin, Osteopontin, |
| | Tamm-Horsfall Urinary Glycoprotein, Tissue Inhibitor of Metalloproteinases 1, Trefoil |
| | Factor 3, Vascular Endothelial Growth Factor |
| Cytokines | Granulocyte-Macrophage Colony-Stimulating Factor, Interferon gamma, Interleukin-2, |
| | Interleukin-3, Interleukin-4, Interleukin-5, Interleukin-6, Interleukin-7, Interleukin-8, |
| | Interleukin-10, Macrophage Inflammatory Protein-1 alpha, Macrophage Inflammatory |
| | Protein-1 beta, Matrix Metalloproteinase-2, Monocyte Chemotactic Protein 1, Tumor |
| | Necrosis Factor alpha, Tumor Necrosis Factor beta, Brain-Derived Neurotrophic Factor, |
| | Eotaxin-1, Intercellular Adhesion Molecule 1, Interleukin-1 alpha, Interleukin-1 beta, |
| | Interleukin-1 Receptor antagonist, Interleukin-12 Subunit p40, Interleukin-12 Subunit p70, |
| | Interleukin-15, Interleukin-17, Interleukin-23, Matrix Metalloproteinase-3, Stem Cell Factor, |
| | Vascular Endothelial Growth Factor |
| Protein | 14.3.3 gamma, 14.3.3 (Pan), 14-3-3 beta, 6-Histidine, a-B-Crystallin, Acinus, Actin beta, |
| | Actin (Muscle Specific), Actin (Pan), Actin (skeletal muscle), Activin Receptor Type II, |
| | Adenovirus, Adenovirus Fiber, Adenovirus Type 2 E1A, Adenovirus Type 5 E1A, ADP- |
| | ribosylation Factor (ARF-6), Adrenocorticotrophic Hormone, AIF (Apoptosis Inducing |
| | Factor), Alkaline Phosphatase (AP), Alpha Fetoprotein (AFP), Alpha Lactalbumin, alpha-1- |
| | antichymotrypsin, alpha-1-antitrypsin, Amphiregulin, Amylin Peptide, Amyloid A, Amyloid |
| | A4 Protein Precursor, Amyloid Beta (APP), Androgen Receptor, Ang-1, Ang-2, APC, |
| | APC11, APC2, Apolipoprotein D, A-Raf, ARC, Ask1/MAPKKK5, ATM, Axonal Growth |
| | Cones, b Galactosidase, b-2-Microglobulin, B7-H2, BAG-1, Bak, Bax, B-Cell, B-cell Linker |
| | Protein (BLNK), Bcl10/CIPER/CLAP/mE10, bcl-2a, Bcl-6, bcl-X, bcl-XL, Bim (BOD), |
| | Biotin, Bonzo/STRL33/TYMSTR, Bovine Serum Albumin, BRCA2 (aa 1323-1346), |
| | BrdU, Bromodeoxyuridine (BrdU), CA125, CA19-9, c-Abl, Cadherin (Pan), Cadherin-E, |
| | Cadherin-P, Calcitonin, Calcium Pump ATPase, Caldesmon, Calmodulin, Calponin, |
| | Calretinin, Casein, Caspase 1, Caspase 2, Caspase 3, Caspase 5, Caspase 6 (Mch 2), Caspase |
| | 7 (Mch 3), Caspase 8 (FLICE), Caspase 9, Catenin alpha, Catenin beta, Catenin gamma, |
| | Cathepsin D, CCK-8, CD1, CD10, CD100/Leukocyte Semaphorin, CD105, CD106/VCAM, |
| | CD115/c-fms/CSF-1R/M-CSFR, CD137 (4-1BB), CD138, CD14, CD15, CD155/PVR (Polio |
| | Virus Receptor), CD16, CD165, CD18, CD1a, CD1b, CD2, CD20, CD21, CD23, CD231, |
| | CD24, CD25/IL-2 Receptor a, CD26/DPP IV, CD29, CD30 (Reed-Sternberg Cell Marker), |
| | CD32/Fcg Receptor II, CD35/CR1, CD36GPIIIb/GPIV, CD3zeta, CD4, CD40, CD42b, |
| | CD43, CD45/T200/LCA, CD45RB, CD45RO, CD46, CD5, CD50/ICAM-3, CD53, |
| | CD54/ICAM-1, CD56/NCAM-1, CD57, CD59/MACIF/MIRL/Protectin, CD6, CD61/ |
| | Platelet Glycoprotein IIIA, CD63, CD68, CD71/Transferrin Receptor, CD79a mb-1, CD79b, |
| | CD8, CD81/TAPA-1, CD84, CD9, CD94, CD95/Fas, CD98, CDC14A Phosphatase, |
| | CDC25C, CDC34, CDC37, CDC47, CDC6, cdh1, Cdk1/p34cdc2, Cdk2, Cdk3, Cdk4, Cdk5, |
| | Cdk7, Cdk8, CDw17, CDw60, CDw75, CDw78, CEA/CD66e, c-erbB-2/HER-2/neu Ab-1 |
| | (21N), c-erbB-4/HER-4, c-fos, Chk1, Chorionic Gonadotropin beta (hCG-beta), |
| | Chromogranin A, CIDE-A, CIDE-B, CITED1, c-jun, Clathrin, claudin 11, Claudin 2, Claudin |
| | 3, Claudin 4, Claudin 5, CLAUDIN 7, Claudin-1, CNPase, Collagen II, Collagen IV, |
| | Collagen IX, Collagen VII, Connexin 43, COX2, CREB, CREB-Binding Protein, |
| | Cryptococcus neoformans, c-Src, Cullin-1 (CUL-1), Cullin-2 (CUL-2), Cullin-3 (CUL-3), |
| | CXCR4/Fusin, Cyclin B1, Cyclin C, Cyclin D1, Cyclin D3, Cyclin E, Cyclin E2, Cystic |
| | Fibrosis Transmembrane Regulator, Cytochrome c, D4-GDI, Daxx, DcR1, DcR2/TRAIL- |
| | R4/TRUNDD, Desmin, DFF40 (DNA Fragmentation Factor 40)/CAD, DFF45/ICAD, |
| | DJ-1, DNA Ligase I, DNA Polymerase Beta, DNA Polymerase Gamma, DNA Primase (p49), |
| | DNA Primase (p58), DNA-PKcs, DP-2, DR3, DR5, Dysferlin, Dystrophin, E2F-1, E2F-2, |
| | E2F-3, E2F-4, E2F-5, E3-binding protein (ARM1), EGFR, EMA/CA15-3/MUC-1, |
| | Endostatin, Epithelial Membrane Antigen (EMA/CA15-3/MUC-1), Epithelial Specific |
| | Antigen, ER beta, ER Ca+2 ATPase2, ERCC1, Erk1, ERK2, Estradiol, Estriol, Estrogen |
| | Receptor, Exo1, Ezrin/p81/80K/Cytovillin, F.VIII/VWF, Factor VIII Related Antigen, FADD |
| | (FAS-Associated death domain-containing protein), Fascin, Fas-ligand, Ferritin, FGF-1, |
| | FGF-2, FHIT, Fibrillin-1, Fibronectin, Filaggrin, Filamin, FITC, Fli-1, FLIP, Flk-1/KDR/ |
| | VEGFR2, Flt-1/VEGFR1, Flt-4, Fra2, FSH, FSH-b, Fyn, Ga0, Gab-1, GABA a Receptor 1, |
| | GAD65, Gai1, Gamma Glutamyl Transferase (gGT), Gamma Glutamylcysteine |
| | Synthetase(GCS)/Glutamate-cysteine Ligase, GAPDH, Gastrin 1, GCDFP-15, G-CSF, |
| | GFAP, Glicentin, Glucagon, Glucose-Regulated Protein 94, GluR 2/3, GluR1, GluR4, |
| | GluR6/7, GLUT-1, GLUT-3, Glycogen Synthase Kinase 3b (GSK3b), Glycophorin A, GM- |
| | CSF, GnRH Receptor, Golgi Complex, Granulocyte, Granzyme B, Grb2, Green Fluorescent |
| | Protein (GFP), GRIP1, Growth Hormone (hGH), GSK-3, GST, GSTmu, H. Pylori, HDAC1, |
| | HDJ-2/DNAJ, Heat Shock Factor 1, Heat Shock Factor 2, Heat Shock Protein 27/hsp27, Heat |
| | Shock Protein 60/hsp60, Heat Shock Protein 70/hsp70, Heat Shock Protein 75/hsp75, Heat |
| | Shock Protein 90a/hsp86, Heat Shock Protein 90b/hsp84, Helicobacter pylori, Heparan |
| | Sulfate Proteoglycan, Hepatic Nuclear Factor-3B, Hepatocyte, Hepatocyte Factor |
| | Homologue-4, Hepatocyte Growth Factor, Heregulin, HIF-1a, Histone H1, hPL, HPV 16, |
| | HPV 16-E7, HRP, Human Sodium Iodide Symporter (hNIS), I-FLICE/CASPER, IFN |
| | gamma, IgA, IGF-1R, IGF-I, IgG, IgM (m-Heavy Chain), I-Kappa-B Kinase b (IKKb), IL-1 |
| | alpha, IL-1 beta, IL-10, IL-10R, IL17, IL-2, IL-3, IL-30, IL-4, IL-5, IL-6, IL-8, Inhibin alpha, |
| | Insulin, Insulin Receptor, Insulin Receptor Substrate-1, Int-2 Oncoprotein, Integrin beta5, |
| | Interferon-a(II), Interferon-g, Involucrin, IP10/CRG2, IPO-38 Proliferation Marker, IRAK, |
| | ITK, JNK Activating kinase (JKK1), Kappa Light Chain, Keratin 10, Keratin 10/13, Keratin |
| | 14, Keratin 15, Keratin 16, Keratin 18, Keratin 19, Keratin 20, Keratin 5/6/18, Keratin 5/8, |
| | Keratin 8, Keratin 8 (phospho-specific Ser73), Keratin 8/18, Keratin (LMW), Keratin (Multi), |
| | Keratin (Pan), Ki67, Ku (p70/p80), Ku (p80), L1 Cell Adhesion Molecule, Lambda Light |
| | Chain, Laminin B1/b1, Laminin B2/g1, Laminin Receptor, Laminin-s, Lck, Lck (p56lck), |
| | Leukotriene (C4, D4, E4), LewisA, LewisB, LH, L-Plastin, LRP/MVP, Luciferase, |
| | Macrophage, MADD, MAGE-1, Maltose Binding Protein, MAP1B, MAP2a, b, MART- |
| | 1/Melan-A, Mast Cell Chymase, Mcl-1, MCM2, MCM5, MDM2, Medroxyprogesterone |
| | Acetate (MPA), Mek1, Mek2, Mek6, Mekk-1, Melanoma (gp100), mGluR1, mGluR5, |
| | MGMT, MHC I (HLA25 and HLA-Aw32), MHC I (HLA-A), MHC I (HLA-A, B, C), MHC I |
| | (HLA-B), MHC II (HLA-DP and DR), MHC II (HLA-DP), MHC II (HLA-DQ), MHC II |
| | (HLA-DR), MHC II (HLA-DR) Ia, Microphthalmia, Milk Fat Globule Membrane Protein, |
| | Mitochondria, MLH1, MMP-1 (Collagenase-I), MMP-10 (Stromilysin-2), MMP-11 |
| | (Stromelysin-3), MMP-13 (Collagenase-3), MMP-14/MT1-MMP, MMP-15/MT2-MMP, |
| | MMP-16/MT3-MMP, MMP-19, MMP-2 (72 kDa Collagenase IV), MMP-23, MMP-7 |
| | (Matrilysin), MMP-9 (92 kDa Collagenase IV), Moesin, mRANKL, Muc-1, Mucin 2, Mucin 3 |
| | (MUC3), Mucin 5AC, MyD88, Myelin/Oligodendrocyte, Myeloid Specific Marker, |
| | Myeloperoxidase, MyoD1, Myogenin, Myoglobin, Myosin Smooth Muscle Heavy Chain, |
| | Nck, Negative Control for Mouse IgG1, Negative Control for Mouse IgG2a, Negative |
| | Control for Mouse IgG3, Negative Control for Mouse IgM, Negative Control for Rabbit IgG, |
| | Neurofilament, Neurofilament (160 kDa), Neurofilament (200 kDa), Neurofilament (68 kDa), |
| | Neuron Specific Enolase, Neutrophil Elastase, NF kappa B/p50, NF kappa B/p65 (Rel A), |
| | NGF-Receptor (p75NGFR), brain Nitric Oxide Synthase (bNOS), endothelial Nitric Oxide |
| | Synthase (eNOS), nm23, NOS-i, NOS-u, Notch, Nucleophosmin (NPM), NuMA, Oct-1, |
| | Oct-2/, Oct-3/, Ornithine Decarboxylase, Osteopontin, p130, p130cas, p14ARF, p15INK4b, |
| | p16INK4a, p170, p170/MDR-1, p18INK4c, p19ARF, p19Skp1, p21WAF1, p27Kip1, p300/ |
| | CBP, p35nck5a, P504S, p53, p57Kip2 Ab-7, p63 (p53 Family Member), p73, p73a, p73a/b, |
| | p95VAV, Parathyroid Hormone, Parathyroid Hormone Receptor Type 1, Parkin, PARP, |
| | PARP (Poly ADP-Ribose Polymerase), Pax-5, Paxillin, PCNA, PCTAIRE2, PDGF, PDGFR |
| | alpha, PDGFR beta, Pds1, Perforin, PGP9.5, PHAS-I, PHAS-II, Phospho-Ser/Thr/Tyr, |
| | Phosphotyrosine, PLAP, Plasma Cell Marker, Plasminogen, PLC gamma 1, PMP-22, |
| | Pneumocystis jiroveci, PPAR-gamma, PR3 (Proteinase 3), Presenillin, Progesterone, |
| | Progesterone Receptor, Progesterone Receptor (phospho-specific) - Serine 190, Progesterone |
| | Receptor (phospho-specific) - Serine 294, Prohibitin, Prolactin, Prolactin Receptor, Prostate |
| | Apoptosis Response Protein-4, Prostate Specific Acid Phosphatase, Prostate Specific |
| | Antigen, pS2, PSCA, Rabies Virus, RAD1, Rad51, Raf1, Raf-1 (Phospho-specific), RAIDD, |
| | Ras, Rad18, Renal Cell Carcinoma, Ret Oncoprotein, Retinoblastoma, Retinoblastoma (Rb) |
| | (Phospho-specific Serine608), Retinoic Acid Receptor (b), Retinoid X Receptor (hRXR), |
| | Retinol Binding Protein, Rhodopsin (Opsin), ROC, RPA/p32, RPA/p70, Ruv A, Ruv B, Ruv |
| | C, S100, S100A4, S100A6, SHP-1, SIM Ag (SIMA-4D3), SIRP a1, sm, SODD (Silencer of |
| | Death Domain), Somatostatin Receptor-I, SRC1 (Steroid Receptor Coactivator-1) Ab-1, |
| | SREBP-1 (Sterol Regulatory Element Binding Protein-1), SRF (Serum Response Factor), |
| | Stat-1, Stat3, Stat5, Stat5a, Stat5b, Stat6, Streptavidin, Superoxide Dismutase, Surfactant |
| | Protein A, Surfactant Protein B, Surfactant Protein B (Pro), Survivin, SV40 Large T Antigen, |
| | Syk, Synaptophysin, Synuclein, Synuclein beta, Synuclein pan, TACE (TNF-alpha |
| | converting enzyme)/ADAM17, TAG-72, tau, TdT, Tenascin, Testosterone, TGF beta 3, |
| | TGF-beta 2, Thomsen-Friedenreich Antigen, Thrombospondin, Thymidine Phosphorylase, |
| | Thymidylate Synthase, Thymine Glycols, Thyroglobulin, Thyroid Hormone Receptor beta, |
| | Thyroid Hormone Receptor, Thyroid Stimulating Hormone (TSH), TID-1, TIMP-1, TIMP-2, |
| | TNF alpha, TNFa, TNR-R2, Topo II beta, Topoisomerase IIa, Toxoplasma Gondii, TR2, |
| | TRADD, Transforming Growth Factor a, Transglutaminase II, TRAP, Tropomyosin, TRP75/ |
| | gp75, TrxR2, TTF-1, Tubulin, Tubulin-a, Tubulin-b, Tyrosinase, Ubiquitin, UCP3, uPA, |
| | Urocortin, Vacular Endothelial Growth Factor(VEGF), Vimentin, Vinculin, Vitamin D |
| | Receptor (VDR), von Hippel-Lindau Protein, Wnt-1, Xanthine Oxidase, XPA, XPF, XPG, |
| | XRCC1, XRCC2, ZAP-70, Zip kinase |
| Known Cancer | ABL1, ABL2, ACSL3, AF15Q14, AF1Q, AF3p21, AF5q31, AKAP9, AKT1, AKT2, |
| Genes | ALDH2, ALK, ALO17, APC, ARHGEF12, ARHH, ARID1A, ARID2, ARNT, ASPSCR1, |
| | ASXL1, ATF1, ATIC, ATM, ATRX, BAP1, BCL10, BCL11A, BCL11B, BCL2, BCL3, |
| | BCL5, BCL6, BCL7A, BCL9, BCOR, BCR, BHD, BIRC3, BLM, BMPR1A, BRAF, |
| | BRCA1, BRCA2, BRD3, BRD4, BRIP1, BTG1, BUB1B, C12orf9, C15orf21, C15orf55, |
| | C16orf75, CANT1, CARD11, CARS, CBFA2T1, CBFA2T3, CBFB, CBL, CBLB, CBLC, |
| | CCNB1IP1, CCND1, CCND2, CCND3, CCNE1, CD273, CD274, CD74, CD79A, CD79B, |
| | CDH1, CDH11, CDK12, CDK4, CDK6, CDKN2A, CDKN2a(p14), CDKN2C, CDX2, |
| | CEBPA, CEP1, CHCHD7, CHEK2, CHIC2, CHN1, CIC, CIITA, CLTC, CLTCL1, |
| | CMKOR1, COL1A1, COPEB, COX6C, CREB1, CREB3L1, CREB3L2, CREBBP, CRLF2, |
| | CRTC3, CTNNB1, CYLD, D10S170, DAXX, DDB2, DDIT3, DDX10, DDX5, DDX6, |
| | DEK, DICER1, DNMT3A, DUX4, EBF1, EGFR, EIF4A2, ELF4, ELK4, ELKS, ELL, ELN, |
| | EML4, EP300, EPS15, ERBB2, ERCC2, ERCC3, ERCC4, ERCC5, ERG, ETV1, ETV4, |
| | ETV5, ETV6, EVI1, EWSR1, EXT1, EXT2, EZH2, FACL6, FAM22A, FAM22B, FAM46C, |
| | FANCA, FANCC, FANCD2, FANCE, FANCF, FANCG, FBXO11, FBXW7, FCGR2B, |
| | FEV, FGFR1, FGFR1OP, FGFR2, FGFR3, FH, FHIT, FIP1L1, FLI1, FLJ27352, FLT3, |
| | FNBP1, FOXL2, FOXO1A, FOXO3A, FOXP1, FSTL3, FUBP1, FUS, FVT1, GAS7, |
| | GATA1, GATA2, GATA3, GMPS, GNA11, GNAQ, GNAS, GOLGA5, GOPC, GPC3, |
| | GPHN, GRAF, HCMOGT-1, HEAB, HERPUD1, HEY1, HIP1, HIST1H4I, HLF, HLXB9, |
| | HMGA1, HMGA2, HNRNPA2B1, HOOK3, HOXA11, HOXA13, HOXA9, HOXC11, |
| | HOXC13, HOXD11, HOXD13, HRAS, HRPT2, HSPCA, HSPCB, IDH1, IDH2, IGH@, |
| | IGK@, IGL@, IKZF1, IL2, IL21R, IL6ST, IL7R, IRF4, IRTA1, ITK, JAK1, JAK2, JAK3, |
| | JAZF1, JUN, KDM5A, KDM5C, KDM6A, KDR, KIAA1549, KIT, KLK2, KRAS, KTN1, |
| | LAF4, LASP1, LCK, LCP1, LCX, LHFP, LIFR, LMO1, LMO2, LPP, LYL1, MADH4, |
| | MAF, MAFB, MALT1, MAML2, MAP2K4, MDM2, MDM4, MDS1, MDS2, MECT1, |
| | MED12, MEN1, MET, MITF, MKL1, MLF1, MLH1, MLL, MLL2, MLL3, MLLT1, |
| | MLLT10, MLLT2, MLLT3, MLLT4, MLLT6, MLLT7, MN1, MPL, MSF, MSH2, MSH6, |
| | MSI2, MSN, MTCP1, MUC1, MUTYH, MYB, MYC, MYCL1, MYCN, MYD88, MYH11, |
| | MYH9, MYST4, NACA, NBS1, NCOA1, NCOA2, NCOA4, NDRG1, NF1, NF2, NFE2L2, |
| | NFIB, NFKB2, NIN, NKX2-1, NONO, NOTCH1, NOTCH2, NPM1, NR4A3, NRAS, |
| | NSD1, NTRK1, NTRK3, NUMA1, NUP214, NUP98, OLIG2, OMD, P2RY8, PAFAH1B2, |
| | PALB2, PAX3, PAX5, PAX7, PAX8, PBRM1, PBX1, PCM1, PCSK7, PDE4DIP, PDGFB, |
| | PDGFRA, PDGFRB, PER1, PHOX2B, PICALM, PIK3CA, PIK3R1, PIM1, PLAG1, PML, |
| | PMS1, PMS2, PMX1, PNUTL1, POU2AF1, POU5F1, PPARG, PPP2R1A, PRCC, PRDM1, |
| | PRDM16, PRF1, PRKAR1A, PRO1073, PSIP2, PTCH, PTEN, PTPN11, RAB5EP, |
| | RAD51L1, RAF1, RALGDS, RANBP17, RAP1GDS1, RARA, RB1, RBM15, RECQL4, |
| | REL, RET, ROS1, RPL22, RPN1, RUNDC2A, RUNX1, RUNXBP2, SBDS, SDH5, SDHB, |
| | SDHC, SDHD, SEPT6, SET, SETD2, SF3B1, SFPQ, SFRS3, SH3GL1, SIL, SLC45A3, |
| | SMARCA4, SMARCB1, SMO, SOCS1, SOX2, SRGAP3, SRSF2, SS18, SS18L1, |
| | SSH3BP1, SSX1, SSX2, SSX4, STK11, STL, SUFU, SUZ12, SYK, TAF15, TAL1, TAL2, |
| | TCEA1, TCF1, TCF12, TCF3, TCF7L2, TCL1A, TCL6, TET2, TFE3, TFEB, TFG, TFPT, |
| | TFRC, THRAP3, TIF1, TLX1, TLX3, TMPRSS2, TNFAIP3, TNFRSF14, TNFRSF17, |
| | TNFRSF6, TOP1, TP53, TPM3, TPM4, TPR, TRA@, TRB@, TRD@, TRIM27, TRIM33, |
| | TRIP11, TSC1, TSC2, TSHR, TTL, U2AF1, USP6, VHL, VTI1A, WAS, WHSC1, |
| | WHSC1L1, WIF1, WRN, WT1, WTX, XPA, XPC, XPO1, YWHAE, ZNF145, ZNF198, |
| | ZNF278, ZNF331, ZNF384, ZNF521, ZNF9, ZRSR2 |
| Known Cancer | AR, androgen receptor; ARPC1A, actin-related protein complex 2/3 subunit A; AURKA, |
| Genes | Aurora kinase A; BAG4, BCl-2 associated anthogene 4; BCl2l2, BCl-2 like 2; BIRC2, |
| | Baculovirus IAP repeat containing protein 2; CACNA1E, calcium channel voltage dependent |
| | alpha-1E subunit; CCNE1, cyclin E1; CDK4, cyclin dependent kinase 4; CHD1L, |
| | chromodomain helicase DNA binding domain 1-like; CKS1B, CDC28 protein kinase 1B; |
| | COPS3, COP9 subunit 3; DCUN1D1, DCN1 domain containing protein 1; DYRK2, dual |
| | specificity tyrosine phosphorylation regulated kinase 2; EEF1A2, eukaryotic elongation |
| | transcription factor 1 alpha 2; EGFR, epidermal growth factor receptor; FADD, Fas- |
| | associated via death domain; FGFR1, fibroblast growth factor receptor 1, GATA6, GATA |
| | binding protein 6; GPC5, glypican 5; GRB7, growth factor receptor bound protein 7; |
| | MAP3K5, mitogen activated protein kinase kinase kinase 5; MED29, mediator complex |
| | subunit 5; MITF, microphthalmia associated transcription factor; MTDH, metadherin; |
| | NCOA3, nuclear receptor coactivator 3; NKX2-1, NK2 homeobox 1; PAK1, |
| | p21/CDC42/RAC1-activated kinase 1; PAX9, paired box gene 9; PIK3CA, |
| | phosphatidylinositol-3 kinase catalytic a; PLA2G10, phopholipase A2, group X; PPM1D, |
| | protein phosphatase magnesium-dependent 1D; PTK6, protein tyrosine kinase 6; PRKCI, |
| | protein kinase C iota; RPS6KB1, ribosomal protein s6 kinase 70 kDa; SKP2, s-phase kinase |
| | associated protein; SMURF1, sMAD specific E3 ubiquitin protein ligase 1; SHH, sonic |
| | hedgehog homologue; STARD3, sTAR-related lipid transfer domain containing protein 3; |
| | YWHAQ, tyrosine 3-monooxygenase/tryptophan 5-monooxygenase activation protein, zeta |
| | isoform; ZNF217, zinc finger protein 217 |
| Mitotic Related | Aurora kinase A (AURKA); Aurora kinase B (AURKB); Baculoviral IAP repeat-containing |
| Cancer Genes | 5, survivin (BIRC5); Budding uninhibited by benzimidazoles 1 homolog (BUB1); Budding |
| | uninhibited by benzimidazoles 1 homolog beta, BUBR1 (BUB1B); Budding uninhibited by |
| | benzimidazoles 3 homolog (BUB3); CDC28 protein kinase regulatory subunit 1B (CKS1B); |
| | CDC28 protein kinase regulatory subunit 2 (CKS2); Cell division cycle 2 (CDC2)/CDK1 |
| | Cell division cycle 20 homolog (CDC20); Cell division cycle-associated 8, borealin |
| | (CDCA8); Centromere protein F, mitosin (CENPF); Centrosomal protein 110 kDa (CEP110); |
| | Checkpoint with forkhead and ring finger domains (CHFR); Cyclin B1 (CCNB1); Cyclin B2 |
| | (CCNB2); Cytoskeleton-associated protein 5 (CKAP5/ch-TOG); Microtubule-associated |
| | protein RP/EB family member 1. End-binding protein 1, EB1 (MAPRE1); Epithelial cell |
| | transforming sequence 2 oncogene (ECT2); Extra spindle poles like 1, separase (ESPL1); |
| | Forkhead box M1 (FOXM1); H2A histone family, member X (H2AFX); Kinesin family |
| | member 4A (KIF4A); Kinetochore-associated 1 (KNTC1/ROD); Kinetochore-associated 2; |
| | highly expressed in cancer 1 (KNTC2/HEC1); Large tumor suppressor, homolog 1 (LATS1); |
| | Large tumor suppressor, homolog 2 (LATS2); Mitotic arrest deficient-like 1; MAD1 |
| | (MAD1L1); Mitotic arrest deficient-like 2; MAD2 (MAD2L1); Mps1 protein kinase (TTK); |
| | Never in mitosis gene a-related kinase 2 (NEK2); Ninein, GSK3b interacting protein (NIN); |
| | Non-SMC condensin I complex, subunit D2 (NCAPD2/CNAP1); Non-SMC condensin I |
| | complex, subunit H (NACPH/CAPH); Nuclear mitotic apparatus protein 1 (NUMA1); |
| | Nucleophosmin (nucleolar phosphoprotein B23, numatrin); (NPM1); Nucleoporin (NUP98); |
| | Pericentriolar material 1 (PCM1); Pituitary tumor-transforming 1, securin (PTTG1); Polo-like |
| | kinase 1 (PLK1); Polo-like kinase 4 (PLK4/SAK); Protein (peptidylprolyl cis/trans |
| | isomerase) NIMA-interacting 1 (PIN1); Protein regulator of cytokinesis 1 (PRC1); RAD21 |
| | homolog (RAD21); Ras association (RalGDS/AF-6); domain family 1 (RASSF1); Stromal |
| | antigen 1 (STAG1); Synuclein-c, breast cancer-specific protein 1 (SNCG, BCSG1); |
| | Targeting protein for Xklp2 (TPX2); Transforming, acidic coiled-coil containing protein 3 |
| | (TACC3); Ubiquitin-conjugating enzyme E2C (UBE2C); Ubiquitin-conjugating enzyme E2I |
| | (UBE2I/UBC9); ZW10 interactor, (ZWINT); ZW10, kinetochore-associated homolog |
| | (ZW10); Zwilch, kinetochore-associated homolog (ZWILCH) |
| Ribonucleoprotein | Argonaute family member, Ago1, Ago2, Ago3, Ago4, GW182 (TNRC6A), TNRC6B, |
| complexes | TNRC6C, HNRNPA2B1, HNRPAB, ILF2, NCL (Nucleolin), NPM1 (Nucleophosmin), |
| | RPL10A, RPL5, RPLP1, RPS12, RPS19, SNRPG, TROVE2, apolipoprotein, apolipoprotein |
| | A, apo A-I, apo A-II, apo A-IV, apo A-V, apolipoprotein B, apo B48, apo B100, |
| | apolipoprotein C, apo C-I, apo C-II, apo C-III, apo C-IV, apolipoprotein D (ApoD), |
| | apolipoprotein E (ApoE), apolipoprotein H (ApoH), apolipoprotein L, APOL1, APOL2, |
| | APOL3, APOL4, APOL5, APOL6, APOLD1 |
| Cytokine Receptors | 4-1BB, ALCAM, B7-1, BCMA, CD14, CD30, CD40 Ligand, CEACAM-1, DR6, Dtk, |
| | Endoglin, ErbB3, E-Selectin, Fas, Flt-3L, GITR, HVEM, ICAM-3, IL-1 R4, IL-1 RI, IL-10 |
| | Rbeta, IL-17R, IL-2Rgamma, IL-21R, LIMPII, Lipocalin-2, L-Selectin, LYVE-1, MICA, |
| | MICB, NRG1-beta1, PDGF Rbeta, PECAM-1, RAGE, TIM-1, TRAIL R3, Trappin-2, uPAR, |
| | VCAM-1, XEDAR |
| Prostate and | ErbB3, RAGE, Trail R3 |
| colorectal cancer | |
| vesicles | |
| Colorectal cancer | IL-1 alpha, CA125, Filamin, Amyloid A |
| vesicles | |
| Colorectal cancer v | Involucrin, CD57, Prohibitin, Thrombospondin, Laminin B1/b1, Filamin, 14.3.3 gamma, |
| adenoma vesicles | 14.3.3 Pan |
| Colorectal | Involucrin, Prohibitin, Laminin B1/b1, IL-3, Filamin, 14.3.3 gamma, 14.3.3 Pan, MMP-15/ |
| adenoma vesicles | MT2-MMP, hPL, Ubiquitin, and mRANKL |
| Brain cancer | Prohibitin, CD57, Filamin, CD18, b-2-Microglobulin, IL-2, IL-3, CD16, p170, Keratin 19, |
| vesicles | Pds1, Glicentin, SRF (Serum Response Factor), E3-binding protein (ARM1), Collagen II, |
| | SRC1 (Steroid Receptor Coactivator-1) Ab-1, Caldesmon, GFAP, TRP75/gp75, alpha-1- |
| | antichymotrypsin, Hepatic Nuclear Factor-3B, PLAP, Tyrosinase, NF kappa B/p50, |
| | Melanoma (gp100), Cyclin E, 6-Histidine, Mucin 3 (MUC3), TdT, CD21, XPA, Superoxide |
| | Dismutase, Glycogen Synthase Kinase 3b (GSK3b), CD54/ICAM-1, Thrombospondin, Gai1, |
| | CD79a mb-1, IL-1 beta, Cytochrome c, RAD1, bcl-X, CD50/ICAM-3, Neurofilament, |
| | Alkaline Phosphatase (AP), ER Ca+2 ATPase2, PCNA, F.VIII/VWF, SV40 Large T Antigen, |
| | Paxillin, Fascin, CD165, GRIP1, Cdk8, Nucleophosmin (NPM), alpha-1-antitrypsin, |
| | CD32/Fcg Receptor II, Keratin 8 (phospho-specific Ser73), DR5, CD46, TID-1, MHC II |
| | (HLA-DQ), Plasma Cell Marker, DR3, Calmodulin, AIF (Apoptosis Inducing Factor), DNA |
| | Polymerase Beta, Vitamin D Receptor (VDR), Bcl10/CIPER/CLAP/mE10, Neuron |
| | Specific Enolase, CXCR4/Fusin, Neurofilament (68 kDa), PDGFR, beta, Growth Hormone |
| | (hGH), Mast Cell Chymase, Ret Oncoprotein, and Phosphotyrosine |
| Melanoma vesicles | Caspase 5, Thrombospondin, Filamin, Ferritin, 14.3.3 gamma, 14.3.3 Pan, CD71/Transferrin |
| | Receptor, and Prostate Apoptosis Response Protein-4 |
| Head and neck | 14.3.3 Pan, Filamin, 14.3.3 gamma, CD71/Transferrin Receptor, CD30, Cdk5, CD138, |
| cancer vesicles | Thymidine Phosphorylase, Ruv 5, Thrombospondin, CD1, Von Hippel-Lindau Protein, |
| | CD46, Rad51, Ferritin, c-Abl, Actin, Muscle Specific, LewisB |
| Membrane proteins | carbonic anhydrase IX, B7, CCCL19, CCCL21, CSAp, HER-2/neu, BrE3, CD1, CD1a, CD2, |
| | CD3, CD4, CD5, CD8, CD11A, CD14, CD15, CD16, CD18, CD19, CD20, CD21, CD22, |
| | CD23, CD25, CD29, CD30, CD32b, CD33, CD37, CD38, CD40, CD40L, CD44, CD45, |
| | CD46, CD52, CD54, CD55, CD59, CD64, CD67, CD70, CD74, CD79a, CD80, CD83, |
| | CD95, CD126, CD133, CD138, CD147, CD154, CEACAM5, CEACAM-6, alpha-fetoprotein |
| | (AFP), VEGF, ED-B fibronectin, EGP-1, EGP-2, EGF receptor (ErbB1), ErbB2, ErbB3, |
| | Factor H, FHL-1, Flt-3, folate receptor, Ga 733, GROB, HMGB-1, hypoxia inducible factor |
| | (HIF), HM1.24, HER-2/neu, insulin-like growth factor (ILGF), IFN-γ, IFN-α, IL-β, IL-2R, |
| | IL-4R, IL-6R, IL-13R, IL-15R, IL-17R, IL-18R, IL-2, IL-6, IL-8, IL-12, IL-15, IL-17, IL-18, |
| | IL-25, IP-10, IGF-1R, Ia, HM1.24, gangliosides, HCG, HLA-DR, CD66a-d, MAGE, mCRP, |
| | MCP-1, MIP-1A, MIP-1B, macrophage migration-inhibitory factor (MIF), MUC1, MUC2, |
| | MUC3, MUC4, MUC5, placental growth factor (P1GF), PSA (prostate-specific antigen), |
| | PSMA, PSMA dimer, PAM4 antigen, NCA-95, NCA-90, A3, A33, Ep-CAM, KS-1, Le(y), |
| | mesothelin, S100, tenascin, TAC, Tn antigen, Thomas-Friedenreich antigens, tumor necrosis |
| | antigens, tumor angiogenesis antigens, TNF-α, TRAIL receptor (R1 and R2), VEGFR, |
| | RANTES, T101, cancer stem cell antigens, complement factors C3, C3a, C3b, C5a, C5 |
| Cluster of | CD1, CD2, CD3, CD4, CD5, CD6, CD7, CD8, CD9, CD10, CD11a, CD11b, CD11c, |
| Differentiation | CD12w, CD13, CD14, CD15, CD16, CDw17, CD18, CD19, CD20, CD21, CD22, CD23, |
| (CD) proteins | CD24, CD25, CD26, CD27, CD28, CD29, CD30, CD31, CD32, CD33, CD34, CD35, CD36, |
| | CD37, CD38, CD39, CD40, CD41, CD42, CD43, CD44, CD45, CD46, CD47, CD48, |
| | CD49a, CD49b, CD49c, CD49d, CD49e, CD49f, CD53, CD54, CD55, CD56, CD57, CD58, |
| | CD59, CD61, CD62E, CD62L, CD62P, CD63, CD68, CD69, CD71, CD72, CD73, CD74, |
| | CD80, CD81, CD82, CD83, CD86, CD87, CD88, CD89, CD90, CD91, CD95, CD96, |
| | CD100, CD103, CD105, CD106, CD107, CD107a, CD107b, CD109, CD117, CD120, |
| | CD127, CD133, CD134, CD135, CD138, CD141, CD142, CD143, CD144, CD147, CD151, |
| | CD152, CD154, CD156, CD158, CD163, CD165, CD166, CD168, CD184, CDw186, |
| | CD195, CD197, CD209, CD202a, CD220, CD221, CD235a, CD271, CD303, CD304, |
| | CD309, CD326 |
| Interleukin (IL) | IL-1, IL-2, IL-3, IL-4, IL-5, IL-6, IL-7, IL-8 or CXCL8, IL-9, IL-10, IL-11, IL-12, IL-13, IL- |
| proteins | 14, IL-15, IL-16, IL-17, IL-18, IL-19, IL-20, IL-21, IL-22, IL-23, IL-24, IL-25, IL-26, IL-27, |
| | IL-28, IL-29, IL-30, IL-31, IL-32, IL-33, IL-35, IL-36 |
| IL receptors | CD121a/IL1R1, CD121b/IL1R2, CD25/IL2RA, CD122/IL2RB, CD132/IL2RG, |
| | CD123/IL3RA, CD131/IL3RB, CD124/IL4R, CD132/IL2RG, CD125/IL5RA, |
| | CD131/IL3RB, CD126/IL6RA, CD130/IR6RB, CD127/IL7RA, CD132/IL2RG, |
| | CXCR1/IL8RA, CXCR2/IL8RB/CD128, CD129/IL9R, CD210/IL10RA, |
| | CDW210B/IL10RB, IL11RA, CD212/IL12RB1, IR12RB2, IL13R, IL15RA, CD4, |
| | CDw217/IL17RA, IL17RB, CDw218a/IL18R1, IL20R, IL20R, IL21R, IL20R, IL23R, |
| | IL20R, LY6E, IL20R1, IL27RA, IL28R, IL31RA |
| Mucin (MUC) | MUC1, MUC2, MUC3A, MUC3B, MUC4, MUC5AC, MUC5B, MUC6, MUC7, MUC8, |
| proteins | MUC12, MUC13, MUC15, MUC16, MUC17, MUC19, and MUC20 |
| MUC1 isoforms | mucin-1 isoform 2 precursor or mature form (NP_001018016.1), mucin-1 isoform 3 |
| | precursor or mature form (NP_001018017.1), mucin-1 isoform 5 precursor or mature form |
| | (NP_001037855.1), mucin-1 isoform 6 precursor or mature form (NP_001037856.1), mucin- |
| | 1 isoform 7 precursor or mature form (NP_001037857.1), mucin-1 isoform 8 precursor or |
| | mature form (NP_001037858.1), mucin-1 isoform 9 precursor or mature form |
| | (NP_001191214.1), mucin-1 isoform 10 precursor or mature form (NP_001191215.1), |
| | mucin-1 isoform 11 precursor or mature form (NP_001191216.1), mucin-1 isoform 12 |
| | precursor or mature form (NP_001191217.1), mucin-1 isoform 13 precursor or mature form |
| | (NP_001191218.1), mucin-1 isoform 14 precursor or mature form (NP_001191219.1), |
| | mucin-1 isoform 15 precursor or mature form (NP_001191200.1), mucin-1 isoform 16 |
| | precursor or mature form (NP_001191201.1), mucin-1 isoform 17 precursor or mature form |
| | (NP_001191202.1), mucin-1 isoform 18 precursor or mature form (NP_001191203.1), |
| | mucin-1 isoform 19 precursor or mature form (NP_001191204.1), mucin-1 isoform 20 |
| | precursor or mature form (NP_001191205.1), mucin-1 isoform 21 precursor or mature form |
| | (NP_001191206.1), mucin-1 isoform 1 precursor or mature form (NP_002447.4), |
| | ENSP00000357380, ENSP00000357377, ENSP00000389098, ENSP00000357374, |
| | ENSP00000357381, ENSP00000339690, ENSP00000342814, ENSP00000357383, |
| | ENSP00000357375, ENSP00000338983, ENSP00000343482, ENSP00000406633, |
| | ENSP00000388172, ENSP00000357378, P15941-1, P15941-2, P15941-3, P15941-4, |
| | P15941-5, P15941-6, P15941-7, P15941-8, P15941-9, P15941-10, secreted isoform, |
| | membrane bound isoform, CA 27.29 (BR 27.29), CA 15-3, PAM4 reactive antigen, |
| | underglycosylated isoform, unglycosylated isoform, CanAg antigen |
| MUC1 interacting | ABL1, SRC, CTNND1, ERBB2, GSK3B, JUP, PRKCD, APC, GALNT1, GALNT10, |
| proteins | GALNT12, JUN, LCK, OSGEP, ZAP70, CTNNB1, EGFR, SOS1, ERBB3, ERBB4, GRB2, |
| | ESR1, GALNT2, GALNT4, LYN, TP53, C1GALT1, C1GALT1C1, GALNT3, GALNT6, |
| | GCNT1, GCNT4, MUC12, MUC13, MUC15, MUC17, MUC19, MUC2, MUC20, MUC3A, |
| | MUC4, MUC5B, MUC6, MUC7, MUCL1, ST3GAL1, ST3GAL3, ST3GAL4, |
| | ST6GALNAC2, B3GNT2, B3GNT3, B3GNT4, B3GNT5, B3GNT7, B4GALT5, GALNT11, |
| | GALNT13, GALNT14, GALNT5, GALNT8, GALNT9, ST3GAL2, ST6GAL1, |
| | ST6GALNAC4, GALNT15, MYOD1, SIGLEC1, IKBKB, TNFRSF1A, IKBKG, MUC1 |
| Tumor markers | Alphafetoprotein (AFP), Carcinoembryonic antigen (CEA), CA-125, MUC-1, Epithelial |
| | tumor antigen (ETA), Tyrosinase, Melanoma-associated antigen (MAGE), p53 |
| Tumor markers | Alpha fetoprotein (AFP), CA15-3, CA27-29, CA19-9, CA-125, Calretinin, |
| | Carcinoembryonic antigen, CD34, CD99, CD117, Chromogranin, Cytokeratin (various |
| | types), Desmin, Epithelial membrane protein (EMA), Factor VIII, CD31 FL1, Glial fibrillary |
| | acidic protein (GFAP), Gross cystic disease fluid protein (GCDFP-15), HMB-45, Human |
| | chorionic gonadotropin (hCG), immunoglobulin, inhibin, keratin (various types), PTPRC |
| | (CD45), lymphocyte marker (various types, MART-1 (Melan-A), Myo D1, muscle-specific |
| | actin (MSA), neurofilament, neuron-specific enolase (NSE), placental alkaline phosphatase |
| | (PLAP), prostate-specific antigen, S100 protein, smooth muscle actin (SMA), synaptophysin, |
| | thyroglobulin, thyroid transcription factor-1, Tumor M2-PK, vimentin |
| Cell adhesion | Immunoglobulin superfamily CAMs (IgSF CAMs), N-CAM (Myelin protein zero), ICAM (1, |
| molecule (CAMs) | 5), VCAM-1, PE-CAM, L1-CAM, Nectin (PVRL1, PVRL2, PVRL3), Integrins, LFA-1 |
| | (CD11a + CD18), Integrin alphaXbeta2 (CD11c + CD18), Macrophage-1 antigen |
| | (CD11b + CD18), VLA-4 (CD49d + CD29), Glycoprotein IIb/IIIa (ITGA2B + ITGB3), |
| | Cadherins, CDH1, CDH2, CDH3, Desmosomal, Desmoglein (DSG1, DSG2, DSG3, DSG4), |
| | Desmocollin (DSC1, DSC2, DSC3), Protocadherin, PCDH1, T-cadherin, CDH4, CDH5, |
| | CDH6, CDH8, CDH11, CDH12, CDH15, CDH16, CDH17, CDH9, CDH10, Selectins, E- |
| | selectin, L-selectin, P-selectin, Lymphocyte homing receptor: CD44, L-selectin, integrin |
| | (VLA-4, LFA-1), Carcinoembryonic antigen (CEA), CD22, CD24, CD44, CD146, CD164 |
| Annexins | ANXA1; ANXA10; ANXA11; ANXA13; ANXA2; ANXA3; ANXA4; ANXA5; ANXA6; |
| | ANXA7; ANXA8; ANXA8L1; ANXA8L2; ANXA9 |
| Cadherins | CDH1, CDH2, CDH12, CDH3, Deomoglein, DSG1, DSG2, DSG3, DSG4, Desmocollin, |
| (“calcium- | DSC1, DSC2, DSC3, Protocadherins, PCDH1, PCDH10, PCDH11x, PCDH11y, PCDH12, |
| dependent | FAT, FAT2, FAT4, PCDH15, PCDH17, PCDH18, PCDH19; PCDH20; PCDH7, PCDH8, |
| adhesion”) | PCDH9, PCDHA1, PCDHA10, PCDHA11, PCDHA12, PCDHA13, PCDHA2, PCDHA3, |
| | PCDHA4, PCDHA5, PCDHA6, PCDHA7, PCDHA8, PCDHA9, PCDHAC1, PCDHAC2, |
| | PCDHB1, PCDHB10, PCDHB11, PCDHB12, PCDHB13, PCDHB14, PCDHB15, |
| | PCDHB16, PCDHB17, PCDHB18, PCDHB2, PCDHB3, PCDHB4, PCDHB5, PCDHB6, |
| | PCDHB7, PCDHB8, PCDHB9, PCDHGA1, PCDHGA10, PCDHGA11, PCDHGA12, |
| | PCDHGA2; PCDHGA3, PCDHGA4, PCDHGA5, PCDHGA6, PCDHGA7, PCDHGA8, |
| | PCDHGA9, PCDHGB1, PCDHGB2, PCDHGB3, PCDHGB4, PCDHGB5, PCDHGB6, |
| | PCDHGB7, PCDHGC3, PCDHGC4, PCDHGC5, CDH9 (cadherin 9, type 2 (T1-cadherin)), |
| | CDH10 (cadherin 10, type 2 (T2-cadherin)), CDH5 (VE-cadherin (vascular endothelial)), |
| | CDH6 (K-cadherin (kidney)), CDH7 (cadherin 7, type 2), CDH8 (cadherin 8, type 2), |
| | CDH11 (OB-cadherin (osteoblast)), CDH13 (T-cadherin-H-cadherin (heart)), CDH15 (M- |
| | cadherin (myotubule)), CDH16 (KSP-cadherin), CDH17 (LI cadherin (liver-intestine)), |
| | CDH18 (cadherin 18, type 2), CDH19 (cadherin 19, type 2), CDH20 (cadherin 20, type 2), |
| | CDH23 (cadherin 23, (neurosensory epithelium)), CDH10, CDH11, CDH13, CDH15, |
| | CDH16, CDH17, CDH18, CDH19, CDH20, CDH22, CDH23, CDH24, CDH26, CDH28, |
| | CDH4, CDH5, CDH6, CDH7, CDH8, CDH9, CELSR1, CELSR2, CELSR3, CLSTN1, |
| | CLSTN2, CLSTN3, DCHS1, DCHS2, LOC389118, PCLKC, RESDA1, RET |
| ECAD (CDH1) | SNAI1/SNAIL, ZFHX1B/SIP1, SNAI2/SLUG, TWIST1, DeltaEF1 |
| downregulators | |
| ECAD | AML1, p300, HNF3 |
| upregulators | |
| ECAD interacting | ACADVL, ACTG1, ACTN1, ACTN4, ACTR3, ADAM10, ADAM9, AJAP1, ANAPC1, |
| proteins | ANAPC11, ANAPC4, ANAPC7, ANK2, ANP32B, APC2, ARHGAP32, ARPC2, ARVCF, |
| | BOC, C1QBP, CA9, CASP3, CASP8, CAV1, CBLL1, CCNB1, CCND1, CCT6A, CDC16, |
| | CDC23, CDC26, CDC27, CDC42, CDH2, CDH3, CDK5R1, CDON, CDR2, CFTR, |
| | CREBBP, CSE1L, CSNK2A1, CTNNA1, CTNNB1, CTNND1, CTNND2, DNAJA1, DRG1, |
| | EGFR, EP300, ERBB2, ERBB2IP, ERG, EZR, FER, FGFR1, FOXM1, FRMD5, FYN, |
| | GBAS, GNA12, GNA13, GNB2L1, GSK3B, HDAC1, HDAC2, HSP90AA1, HSPA1A, |
| | HSPA1B, HSPD1, IGHA1, IQGAP1, IRS1, ITGAE, ITGB7, JUP, KIFC3, KLRG1, KRT1, |
| | KRT9, LIMA1, LMNA, MAD2L2, MAGI1, MAK, MDM2, MET, MYO6, MYO7A, |
| | NDRG1, NEDD9, NIPSNAP1, NKD2, PHLPP1, PIP5K1C, PKD1, PKP4, PLEKHA7, |
| | POLR2E, PPP1CA, PRKD1, PSEN1, PTPN1, PTPN14, PTPRF, PTPRM, PTPRQ, PTTG1, |
| | PVR, PVRL1, RAB8B, RRM2, SCRIB, SET, SIX1, SKI, SKP2, SRC, TACC3, TAS2R13, |
| | TGM2, TJP1, TK1, TNS3, TTK, UBC, USP9X, VCL, VEZT, XRCC5, YAP1, YES1, |
| | ZC3HC1 |
| Epithelial- | SERPINA3, ACTN1, AGR2, AKAP12, ALCAM, AP1M2, AXL, BSPRY, CCL2, CDH1, |
| mesenchymal | CDH2, CEP170, CLDN3, CLDN4, CNN3, CYP4X1, DNMT3A, DSG3, DSP, EFNB2, EHF, |
| transition (EMT) | ELF3, ELF5, ERBB3, ETV5, FLRT3, FOSB, FOSL1, FOXC1, FX YD 5, GPDIL, HMGA1, |
| | HMGA2, HOPX, IFI16, IGFBP2, IHH, IKBIP, IL-11, IL-18, IL6, IL8, ITGA5, ITGB3, |
| | LAMBl, LCN2, MAP7, MB, MMP7, MMP9, MPZL2, MSLN, MTA3, MTSS1, OCLN, |
| | PCOLCE2, PECAM1, PLAUR, PLXNB1, PPL, PPP1R9A, RASSF8, SCNN1A, SERPINB2, |
| | SERPINE1, SFRP1, SH3YL1, SLC27A2, SMAD7, SNAI1, SNAI2, SPARC, SPDEF, SRPX, |
| | STAT5A, TBX2, TJP3, TMEM125, TMEM45B, TWIST1, VCAN, VIM, VWF, XBP1, |
| | YBX1, ZBTB10, ZEB1, ZEB2 |
| Vesicle Associated | ALB, C3, A2M, TF, APOB, KRT1, KRT10, FGA, IGHG1, SERPINA1, FGB, KRT2, HP, |
| | IGHG3, IGHA1, SERPINA3, C4A, IGKC, C4B, CP, IGHM, FGG, KRT9, IGHG2, FN1, |
| | CFH, SERPINC1, C4A, APOA1, GC, Ig mu heavy chain disease protein, IGHG4, HPX, |
| | IGHA2, IGLC2, ITIH1, KNG1, ITIH4, ITIH2, AGT, PLG, APOA4, KRT14, CFB, IGLC1, |
| | ITIH4, ORM1, ITIH4, AHSG, A1BG, IGLL5, SERPING1, Ig kappa chain V-I region DEE, |
| | APOE, Ig kappa chain V-I region OU, ORM2, AFM, Ig heavy chain V-III region BUT, |
| | C4BPA, KRT6A, SERPINF1, APCS, APOH, CLU, KRT5, Ig heavy chain V-III region BRO, |
| | Ig heavy chain V-III region GAL, HRG, Ig heavy chain V-III region CAM, VTN, |
| | SERPIND1, TTR, PON1, Ig heavy chain V-III region TIL, C1QC, SERPINA7, Ig kappa |
| | chain V-I region CAR, Ig kappa chain V-IV region Len, AMBP, KRT13, Ig kappa chain V- |
| | III region SIE, SERPINF2, Ig heavy chain V-III region VH26, C5, F2, IGKV4-1, C7, Ig |
| | kappa chain V-I region EU, Ig kappa chain V-III region NG9 (Fragment), GSN, LPA, LYZ, |
| | Ig kappa chain V-III region HAH, Ig lambda chain V-III region LOI, SERPINA6, AZGP1, |
| | CIS, CFHR1, C9, HRNR, APOL1, C1QB, Ig kappa chain V-I region Ni, Ig heavy chain V- |
| | III region WEA, Ig kappa chain V-II region TEW, SERPINA4, DCD, LRG1, GSN, RBP4, |
| | SMC3, PRSS3, IGJ, C6, SEPP1, HBA1, Ig kappa chain V-III region CLL, ABCF1, APOD, |
| | SERPINA5, PDE4D, C2, C8A, C1R, CD5L, CFHR2, FLG2, HBB, CFI, Ig kappa chain V-II |
| | region MIL, Ig heavy chain V-II region NEWM, C8G, Ig lambda chain V-III region SH, |
| | PGLYRP2, SBSN, Ig lambda chain V-I region WAH, Ig lambda chain V-IV region Hil, |
| | SAA4, F10, MASP1, SHROOM3, F13A1, Ig lambda chain V region 4A, GIT2, KLKB1, |
| | ATRN, Ig heavy chain V-I region HG3, ITIH3, CDK10, APOA2, Ig heavy chain V-II region |
| | OU, Ig heavy chain V-I region V35, UTF1, MAP1B, PAPLN, Ig kappa chain V-I region Lay, |
| | RNF207, VPS13D, CRYGN, HMCN1, SLC27A6, FN1, VWF, C8B, LGALS3BP, HP, |
| | PROS1, ECM1, HPR, LBP, HABP2, FCN2, KRT77, APOM, Ig kappa chain V-I region |
| | WEA, GC, PLA2G7, Ig kappa chain V-I region Scw, CFP, APOM, MASP1, IGKV1-5, F12, |
| | SERPINA1, F13B, FCN2, PCYOX1, C4BPB, LCAT, KRT73, Ig heavy chain V-III region |
| | GA, Ig kappa chain V-III region VG (Fragment), MBL2, EEF2, MAP3K6, EPHA5, APOC4, |
| | CAMP, SERPINA10, FCGBP, PCSK9, CPB2, CFHR5, SAFB2, C2CD4C, F5, NUP153, |
| | XYLT1, EP300, BMP8A, N4BP2, KRT4, KRT16, Ig kappa chain V-III region B6, KRT86, |
| | KRT85, ANXA1, KRT78, SPRR2E, CLU, CRNN, ARHGEF17, SPRR3, FN1, ARHGAP30, |
| | ACTG2, SFTPA1, CDC5L, FN1, IGLC7, FLG, SERPINA1, Ig heavy chain V-III region |
| | TUR, JUP, DSP, KNG1, KPRP, LCE1C, Ig heavy chain V-II region ARH-77, Ig kappa chain |
| | V-III region POM, FBLN1, C1QA, FCN3, Ig lambda chain V-IV region Bau, Ig lambda |
| | chain V-VI region WLT, UPF3A, SERPINF2, XIRP2, CFB, SERPINA3, DSG1, TTN, |
| | LRRCC1, MYO15A, ANKRD28, Ig heavy chain V-III region HIL, KIT, DNMT1, PLXND1, |
| | Ig kappa chain V-I region Mev, IGHD, RCBTB1, BCO1, KRT6B, KRT13, Ig kappa chain V- |
| | II region RPMI 6410, Ig kappa chain V-IV region B17, ACTB, FN1, SARDH, GK, EMC4, |
| | MED30, PIGR, HSPB1, DSP, VEPH1, SNX27, LRRC53, SIGLEC16, F9, Ig heavy chain V- |
| | III region TRO, APOC3, TOP2A, FLYWCH1, ACTL10 |
| Vesicle Associated | KRT6A, DSP, KRT6B, ACTB, FLG, IVL, SFN, KRT77, LMNA, KRT15, LGALS7, |
| | HSPA8, EPPK1, HSPA1A, DSG1, GSN, HIST1H2BK, EEF1A1, RPLP2, KRT74, YWHAB, |
| | PKP1, JUP, HNRNPA1, HSP90AA1, HIST1H2AH, GAPDH, HIST1H1E, HSPB1, |
| | CALML5, DCD, YWHAQ, VCP, AHNAK, SFPQ, PLEC, SERBP1, P4HB, PPL, Ig lambda |
| | chain V-IV region Hil, EIF3B, HSPA5, C3, TUBB4A, IGHG1, RPS3A, PPIA, SPTBN2, |
| | PDIA3, KRT80, DBNL, RPL29, RPL3, ANXA2P2, TPI1, RDX, H1F0, PGAM2, IGLC2, |
| | EVPL, ENO1, HNRNPA2B1, RPL7A, MYL6, ANXA1, TRIM29, RPS19, POF1B, RPL6, |
| | MORC2, RTN4, CA/CK E, LYZ, ZDBF2, IGKC, Ig heavy chain V-III region TIL, C4BPA, |
| | ACTB, LCE1C, IGHG3, SHOX2, KRT17, KRT77, KRT80, PIGR, KNG1, DSG1, DSP, |
| | SHROOM3, FGA, KPRP, DUSP27, LCE1C, SARDH, LYZ, SHISA5, HSP90AB1, EEF1A1, |
| | FGB, SHROOM3, IGLC2, KRT85, BMP8A, LCE2B, KRT6A, IGKC, S100A9, EEF1A1, |
| | C3, DCD, S100A8, LCE1C, ALB, IGLC2, S100A9, HSP90AB1, ACTB, KRT5, Ig kappa |
| | chain V-II region MIL, HRNR, IGHG1, HIST1H4A, DEFA1, LYZ, C3, SHROOM3, Ig |
| | kappa chain V-IV region STH (Fragment), Ig lambda chain V-I region HA, IGHA2, SARDH, |
| | H3F3C, LTF, TF |
| Vesicle Associated | C3, A2M, APOB, IGKC, C4A, C4B, FGB, ALB, CFH, IGHG1, FGA, FN1, PLG, IGHM, |
| | FGG, TF, C5, CP, IGHG2, IGLC2, Ig mu heavy chain disease protein, ITIH1, PZP, IGHG3, |
| | IGLL5, HP, C4BPA, ITIH2, IGHA1, KRT1, KRT10, APOE, Ig kappa chain V-I region DEE, |
| | AMBP, F2, C7, C6, ITIH4, CFB, IGHG4, APOH, APOA1, CD5L, C1R, HPR, Ig kappa |
| | chain V-I region Scw, IGHA2, CFHR1, KRT2, Ig kappa chain V-III region SIE, HRG, Ig |
| | heavy chain V-III region BRO, C1QB, GC, Ig heavy chain V-III region TIL, Ig kappa chain |
| | V-III region NG9 (Fragment), Ig heavy chain V-III region BUT, Ig heavy chain V-III region |
| | TUR, C9, SERPIND1, Ig kappa chain V-I region WEA, Ig kappa chain V-I region Ni, Ig |
| | kappa chain V-IV region Len, Ig kappa chain V-I region EU, Ig kappa chain V-II region |
| | TEW, Ig heavy chain V-III region GAL, KNG1, VTN, C8B, Ig lambda chain V-III region |
| | LOI, Ig heavy chain V-II region NEWM, APCS, KLKB1, CFI, PROS1, LPA, KRT9, |
| | SERPINA1, Ig lambda chain V-III region SH, C8A, Ig kappa chain V-III region B6, Ig |
| | lambda chain V-IV region Hil, Ig kappa chain V-III region CLL, C1S, FCN3, SERPINC1, Ig |
| | kappa chain V-I region Mev, IGHD, C1QC, HPX, C8G, IGKV1-5, Ig kappa chain V-I region |
| | Wes, Ig heavy chain V-III region WEA, A1BG, GSN, FBLN1, HBB, ITIH3, F12, |
| | SERPINA3, APOC3, Ig kappa chain V-I region BAN, Ig kappa chain V-III region VH |
| | (Fragment), F13B, IGKV4-1, SERPINF2, CLU, HIST1H1D, PON1, IGJ, Ig kappa chain V- |
| | III region POM, Ig heavy chain V-III region CAM, Ig heavy chain V-III region BUR, Ig |
| | kappa chain V-III region VG (Fragment), APOD, Ig lambda chain V-IV region MOL, Ig |
| | heavy chain V-III region GAR, FCGBP, APOM, F13A1, Ig heavy chain V-I region HG3, |
| | C1QA, Ig lambda chain V-VI region WLT, C2, C4BPB, CFP, SERPINA4, SAA4, |
| | SERPINF1, LGALS3BP, HABP2, RCBTB1, APOL1, KCNQ2, F9, Ig heavy chain V-III |
| | region TRO, Ig heavy chain V-III region HIL, Ig heavy chain V-II region OU, APOA2, F11, |
| | Ig lambda chain V-I region WAH, Ig lambda chain V region 4A, Ig kappa chain V-II region |
| | RPMI 6410, Ig kappa chain V-III region IARC/BL41, KRT5, IGLL1, Ig heavy chain V-I |
| | region V35, HBA1, ADIPOQ, PGLYRP2, UPF3A, BCO1, ARFGAP3, SARDH, SERPINA1, |
| | KNG1, Ig kappa chain V-I region Kue, Ig kappa chain V-I region Lay, Ig kappa chain V-I |
| | region OU, Ig kappa chain V-II region MIL, Ig heavy chain V-III region VH26, Ig heavy |
| | chain V-III region GA, FN1, TTR, SERPING1, APOA4, PRSS1, ANXA6, CFTR, LBP, |
| | FBLN1, SPAG17, PDLIM2, ARHGEF17, IGLC7, AGRN, AGT, RBP4, AHSG, Ig kappa |
| | chain V-III region GOL, SERPINA5, GSN, Ig kappa chain V-III region HAH, CFHR2, |
| | GIT2, INCENP |
| Vesicle Associated | MUC5B, FABP5, HPX, CP, SPRR2E, SPRR2D, PDE4D, GC, CPD, CD14, LAP3, |
| | AFM, FCN2, DMBT1, LIFR, SNX27, LCN1, ARFIP1, APOH, KLKB1, XP32, |
| | H2AFV, KRT75, KRT6C, KRT83, KRT76, KRT33B, KRT72, KRT31, KRT73, |
| | DSG1, LCE1C, LCE1A, CFB, CFH, SERPINA1, Ig kappa chain V-I region EU, Ig |
| | kappa chain V-II region MIL, Ig lambda chain V-IV region Bau, Ig heavy chain V- |
| | III region GAL, IGLC6, ACTG2 |

[0311] Examples of additional biomarkers that can be incorporated into the methods and compositions of the invention include without limitation those disclosed in International Patent Application Nos. PCT/US2012/042519 (WO 2012/174282), filed Jun. 14, 2012 and PCT/US2012/050030 (WO 2013/022995), filed Aug. 8, 2012.

[0312] In various embodiments of the invention, the biomarkers or biosignature used to detect or assess any of the conditions or diseases disclosed herein can comprise one or more biomarkers in one of several different categories of markers, wherein the categories include without limitation one or more of: 1) disease specific biomarkers; 2) cell- or tissue-specific biomarkers; 3) vesicle-specific markers (e.g., general vesicle biomarkers); 4. angiogenesis-specific biomarkers; and 5) immunomodulatory biomarkers. Examples of all such markers are disclosed herein and known to a person having ordinary skill in the art. Furthermore, a biomarker known in the art that is characterized to have a role in a particular disease or condition can be adapted for use as a target in compositions and methods of the invention. In further embodiments, such biomarkers that are associated with vesicles can be all vesicle surface markers, or a combination of vesicle surface markers and vesicle payload markers (i.e., molecules enclosed by a vesicle). The biomarkers assessed can be from a combination of sources. For example, a disease or disorder may be detected or characterized by assessing a combination of proteins, nucleic acids, vesicles, circulating biomarkers, biomarkers from a tissue sample, and the like. In addition, as noted herein, the biological sample assessed can be any biological fluid, or can comprise individual components present within such biological fluid (e.g., vesicles, nucleic acids, proteins, or complexes thereof).

[0313] EpCAM is a pan-epithelial differentiation antigen that is expressed on many tumor cells. It is intricately linked with the Cadherin-Catenin pathway and hence the fundamental WNT pathway responsible for intracellular signalling and polarity. It has been used as an immunotherapeutic target in the treatment of gastrointestinal, urological and other carcinomas. (Chaudry M A, Sales K, Ruf P, Lindhofer H, Winslet M C (April 2007). Br. J. Cancer 96 (7): 1013-9.). It is expressed in undifferentiated pluripotent stem cells. EpCAM is a member of a family that includes at least two type I membrane proteins and functions as a homotypic calcium-independent cell adhesion molecule. Mutations in this gene result in congenital tufting enteropathy. EpCAM has been observed on the surface of microvesicles derived from cancer cell of various lineages. EpCAM is used as an exemplary surface antigen in various examples herein. One of skill will appreciate that various embodiments and examples using EpCAM can be applied to other microvesicle surface antigens as well.

### Oligonucleotide Probe Methods

[0314] Nucleic acid sequences fold into secondary and tertiary motifs particular to their nucleotide sequence. These motifs position the positive and negative charges on the nucleic acid sequences in locations that enable the sequences to bind to specific locations on target molecules, e.g., proteins and other amino acid sequences. These binding sequences are known in the field as aptamers. Due to the trillions of possible unique nucleotide sequences in even a relatively short stretch of nucleotides (e.g., 10, 11, 12, 13, 14, 15, 16, 17, 18, 19, 20, 21, 22, 23, 24, 25, 26, 27, 28, 29, 30, 31, 32, 33, 34, 35, 36, 37, 38, 39 or 40 nucleotides), a large variety of motifs can be generated, resulting in aptamers for almost any desired protein or other target.

[0315] Aptamers are created by randomly generating oligonucleotides of a specific length, typically 20-80 base pairs long, e.g., 20, 21, 22, 23, 24, 25, 26, 27, 28, 29, 30, 31, 32, 33, 34, 35, 36, 37, 38, 39, 40, 41, 42, 43, 44, 45, 46, 47, 48, 49, 50, 51, 52, 53, 54, 55, 56, 57, 58, 59, 60, 61, 62, 63, 64, 65, 66, 67, 68, 69, 70, 71, 72, 73, 74, 75, 76, 77, 78, 79 or 80 base pairs. These random oligonucleotides are then incubated with the protein target of interest. After several wash steps, the oligonucleotides that bind to the target are collected and amplified. The amplified aptamers are then added to the target and the process is repeated, often 15-20 times. A common version of this process known to those of skill in the art as the SELEX method.

[0316] The end result comprises one or more aptamer with high affinity to the target. The invention provides further processing of such resulting aptamers that can be use to provide desirable characteristics: 1) competitive binding assays to identify aptamers to a desired epitope; 2) motif analysis to identify high affinity binding aptamers in silico; and 3) microvesicle-based aptamer selection assays to identify aptamers that can be used to detect a particular disease. The methods are described in more detail below and further in the Examples.

[0317] The invention further contemplates aptamer sequences that are highly homologous to the sequences that are discovered by the methods of the invention. “High homology” typically refers to a homology of 40% or higher, preferably 60% or higher, more preferably 80% or higher, even more preferably 85%, 90%, 91%, 92%, 93%, 94%, 95%, 96%, 97%, 98%, 99% or higher between a polynucleotide sequence sequence and a reference sequence. In an embodiment, the reference sequence comprises the sequence of one or more aptamer provided herein. Percent homologies (also referred to as percent identity) are typically carried out between two optimally aligned sequences. Methods of alignment of sequences for comparison are well-known in the art. Optimal alignment of sequences and comparison can be conducted, e.g., using the algorithm in “Wilbur and Lipman, Proc Natl Acad Sci USA 80: 726-30 (1983)”. Homology calculations can also be performed using BLAST, which can be found on the NCBI server at: www.ncbi.nlm.nih.gov/BLAST/ (Altschul S F, et al, Nucleic Acids Res. 1997; 25(17):3389-402; Altschul S F, et al, J Mol. Biol. 1990; 215(3):403-10). In the case of an isolated polynucleotide which is longer than or equivalent in length to the reference sequence, e.g., a sequence identified by the methods herein, the comparison is made with the full length of the reference sequence. Where the isolated polynucleotide is shorter than the reference sequence, e.g., shorter than a sequence identified by the methods herein, the comparison is made to a segment of the reference sequence of the same length (excluding any loop required by the homology calculation).

[0318] The invention further contemplates aptamer sequences that are functional fragments of the sequences that are discovered by the methods of the invention. In the context of an aptamer sequence, a “functional fragment” of the aptamer sequence may comprise a subsequence that binds to the same target as the full length sequence. In some instances, a candidate aptamer sequence is from a member of a library that contains a 5′ leader sequences and/or a 3′ tail sequence. Such leader sequences or tail sequences may serve to facilitate primer binding for amplification or capture, etc. In these embodiments, the functional fragment of the full length sequence may comprise the subsequence of the candidate aptamer sequence absent the leader and/or tail sequences.

### Competitive Antibody Addition

[0319] Known aptamer production methods may involve eluting all bound aptamers from the target sequence. In some cases, this is not sufficient to identify the desired aptamer sequence. For example, when trying to replace an antibody in an assay, it may be desirable to only collect aptamers that bind to the specific epitope of the antibody being replaced. The invention provides a method comprising addition of an antibody that is to be replaced to the aptamer/target reaction in order to allow for the selective collection of aptamers which bind to the antibody epitope. In an embodiment, the method comprises incubating a reaction mixture comprising randomly generated oligonucleotides with a target of interest, removing unbound aptamers from the reaction mixture that do not bind the target, adding an antibody to the reaction mixture that binds to that epitope of interest, and collecting the aptamers that are displaced by the antibody. The target can be a protein. See, e.g., FIG. 1, which illustrates the method for identifying an aptamer to a specific epitope of EpCam.

### Motif Analysis

[0320] In most aptamer experiments, multiple aptamer sequences are identified that bind to the target. These aptamers will have various binding affinities. It can be time consuming and laborious to generate quantities of these many aptamers sufficient to assess the affinities of each. To identify large numbers of aptamers with the highest affinities without physically screening large subsets, the invention provides a method comprising the analysis of the two dimensional structure of one or more high affinity aptamers to the target of interest. In an embodiment, the method comprises screening the database for aptamers that have similar two-dimensional structures, or motifs, but not necessarily similar primary sequences. In an embodiment, the method comprises identifying a high affinity aptamer using traditional methods such as disclosed herein or known in the art (e.g. surface plasmon resonance binding assay, see FIG. 5), approximating the two-dimensional structure of the high affinity aptamer, and identifying aptamers from a pool of sequences that are predicted to have a similar two-dimensional structure to the high affinity aptamer. The method thereby provides a pool of candidates that also bind the target of interest. The two-dimensional structure of an oligo can be predicting using methods known in the art, e.g., via free energy (AG) calculations performed using a commercially available software program such as Vienna or mFold, for example as described in Mathews, D., Sabina, J., Zucker, M. & Turner, H. Expanded sequence dependence of thermodynamic parameters provides robust prediction of RNA secondary structure. J. Mol. Biol. 288, 911-940 (1999); Hofacker et al., Monatshefte f. Chemie 125: 167-188 (1994); and Hofacker, I. L. Vienna RNA secondary structure server. Nucleic Acids Res. 31, 3429-3431 (2003), the contents of which are incorporated herein by reference in their entirety. See FIGS. 3A-3B. The pool of sequences can be sequenced from a pool of randomly generated aptamer candidates using a high-throughput sequencing platform, such as the Ion Torrent platform from Life Technologies. Identifying aptamers from a pool of sequences that are predicted to have a similar two-dimensional structure to the high affinity aptamer may comprise loading the resulting sequences into the software program of choice to identify members of the pool of sequences with similar two-dimensional structures as the high affinity aptamer. The affinities of the pool of sequences can then be determined in situ, e.g., surface plasmon resonance binding assay or the like.

### Aptamer Subtraction Methods

[0321] In order to develop an assay to detect a disease, for example, cancer, one typically screens a large population of known biomarkers from normal and diseased patients in order to identify markers that correlate with disease. This process only works if discriminating markers are already described. In order to address this problem, the invention provides a method comprising subtracting out non-discriminating aptamers from a large pool of aptamers by incubating them initially with non-target microvesicles or cells. The non-target cells can be normal cells or microvesicles shed therefrom. The aptamers that did not bind to the normal microvesicles or cells are then incubated with diseased microvesicles or cells. The aptamers that bind to the diseased microvesicles or cells but that did not bind to the normal cells are then possible candidates for an assay to detect the disease. This process is independent of knowing the existence of a particular marker in the diseased sample.

[0322] Subtraction methods can be used to identify aptamers that preferentially recognize a desired population of targets. In an embodiment, the subtraction method is used to identify aptamers that preferentially recognize target from a diseased target population over a control (e.g., normal or non-diseased) population. The diseased target population may be a population of vesicles from a diseased individual or individuals, whereas the control population comprises vesicles from a non-diseased individual or individuals. The disease can be a cancer or other disease disclosed herein or known in the art. Accordingly, the method provides aptamers that preferentially identify disease targets versus control targets.

[0323] Circulating microvesicles can be isolated from control samples, e.g., plasma from “normal” individuals that are absent a disease of interest, such as an absence of cancer. Vesicles in the sample are isolated using a method disclosed herein or as known in the art. For example, vesicles can be isolated from the plasma by one of the following methods: filtration, ultrafiltration, nanomembrane ultrafiltration, the ExoQuick reagent (System Biosciences, Inc., Mountain View, CA), centrifugation, ultracentrifugation, using a molecular crowding reagent (e.g., TEXIS from Life Technologies), polymer precipitation (e.g., polyethylene glycol (PEG)), affinity isolation, affinity selection, immunoprecipitation, chromatography, size exclusion, or a combination of any of these methods. The microvesicles isolated in each case will be a mixture of vesicle types and will be various sizes although ultracentrifugation methods may have more tendencies to produce exosomal-sized vesicles. Randomly generated oligonucleotide libraries (e.g., produced as described in the Examples herein) are incubated with the isolated normal vesicles. The aptamers that do not bind to these vesicles are isolated, e.g., by spinning down the vesicles and collecting the supernatant containing the non-binding aptamers. These non-binding aptamers are then contacted with vesicles isolated from diseased patients (e.g., using the same methods as described above) to allow the aptamers to recognize the disease vesicles. Next, aptamers that are bound to the diseased vesicles are collected. In an embodiment, the vesicles are isolated then lysed using a chaotropic agent (e.g., SDS or a similar detergent), and the aptamers are then captured by running the lysis mixture over an affinity column. The affinity column may comprise streptavidin beads in the case of biotin conjugated aptamer pools. The isolated aptamers are the amplified. The process can then then repeated, e.g., 1, 2, 3, 4, 5, 6, 7, 8, 9, 10, 11, 12, 13, 14, 15, 16, 17, 18, 19 or 20 or more times.

[0324] In one aspect of the invention, an aptamer profile is identified that can be used to characterize a biological sample of interest. In an embodiment, a pool of randomly generated oligonucleotides, e.g., at least 10, 10², 10³, 10⁴, 10⁵, 10⁶, 10⁷, 10⁸, 10⁹, 10¹⁰, 10¹¹, 10¹², 10¹³, 10¹⁴, 10¹⁵, 10¹⁶, 10¹², 10¹⁸, 10¹⁹ or at least 10²⁰ oligonucleotides, is contacted with a biological component or target of interest from a control population. The oligonucleotides that do not bind the biological component or target of interest from the control population are isolated and then contacted with a biological component or target of interest from a test population. The oligonucleotides that bind the biological component or target of interest from the test population are retained. The retained oligonucleotides can be used to repeat the process by contacting the retained oligonucleotides with the biological component or target of interest from the control population, isolating the retained oligonucleotides that do not bind the biological component or target of interest from the control population, and again contacting these isolated oligonucleotides with the biological component or target of interest from the test population and isolating the binding oligonucleotides. The “component” or “target” can be anything that is present in sample to which the oligonucleotides are capable of binding (e.g., polypeptides, peptide, nucleic acid molecules, carbohydrates, lipids, etc.). The process can be repeated any number of desired iterations, e.g., 1, 2, 3, 4, 5, 6, 7, 8, 9, 10, 11, 12, 13, 14, 15, 16, 17, 18, 19 or 20 or more times. The resulting oligonucleotides comprise aptamers that can differentially detect the test population versus the control. These aptamers provide an aptamer profile, which comprises a biosignature that is determined using one or more aptamer, e.g., a biosignature comprising a presence or level of the component or target which is detected using the one or more aptamer.

[0325] An exemplary process is illustrated in FIG. 4, which demonstrates the method to identify aptamer that preferentially recognize cancer vesicles using vesicles from normal (non-cancer) individuals as a control. In the figure, exosomes are exemplified but one of skill will appreciate that other microvesicles can be used in the same manner. The resulting aptamers can provide a profile that can differentially detect the cancer vesicles from the normal vesicles. One of skill will appreciate that the same steps can be used to derive an aptamer profile to characterize any disease or condition of interest.

[0326] In an embodiment, the invention provides an isolated polynucleotide that encodes a polypeptide, or a fragment thereof, identified by the methods above. The invention further provides an isolated polynucleotide having a nucleotide sequence that is at least 60% identical to the nucleotide sequence identified by the methods above. More preferably, the isolated nucleic acid molecule is at least 65%, 70%, 75%, 80%, 85%, 90%, 91%, 92%, 93%, 94%, 95%, 96%, 97%, 98%, 99% or more, identical to the nucleotide sequence identified by the methods above. In the case of an isolated polynucleotide which is longer than or equivalent in length to the reference sequence, e.g., a sequence identified by the methods above, the comparison is made with the full length of the reference sequence. Where the isolated polynucleotide is shorter than the reference sequence, e.g., shorter than a sequence identified by the methods above, the comparison is made to a segment of the reference sequence of the same length (excluding any loop required by the homology calculation).

[0327] In a related aspect, the invention provides a method of characterizing a biological phenotype using an aptamer profile. The aptamer profile can be determined using the method above. The aptamer profile can be determined for a test sample and compared to a control aptamer profile. The phenotype may be a disease or disorder such as a cancer. Characterizing the phenotype can include without limitation providing a diagnosis, prognosis, or theranosis. Thus, the aptamer profile can provide a diagnostic, prognostic and/or theranostic readout for the subject from whom the test sample is obtained.

[0328] In another embodiment, an aptamer profile is determined for a test sample by contacting a pool of aptamer molecules to the test sample, contacting the same pool of aptamers to a control sample, and identifying one or more aptamer molecules that differentially bind a component or target in the test sample but not in the control sample (or vice versa). A “component” or “target” as used in the context of the biological test sample or control sample can be anything that is present in sample to which the aptamers are capable of binding (e.g., polypeptides, peptide, nucleic acid molecules, carbohydrates, lipids, etc.). For example, if a sample is a plasma or serum sample, the aptamer molecules may bind a polypeptide biomarker that is solely expressed or differentially expressed (over- or underexpressed) in a disease state as compared to a non-diseased subject. Comparison of the aptamer profile in the test sample as compared to the control sample may be based on qualitative and quantitative measure of aptamer binding (e.g., binding versus no binding, or level of binding in test sample versus different level of binding in the reference control sample).

[0329] In an aspect, the invention provides a method of identifying a target-specific aptamer profile, comprising contacting a biological test sample with a pool of aptamer molecules, contacting the pool to a control biological sample, identifying one or more aptamers that bind to a component in said test sample but not to the control sample, thereby identifying an aptamer profile for said biological test sample. In an embodiment, a pool of aptamers is selected against a disease sample and compared to a reference sample, the aptamers in a subset that bind to a component(s) in the disease sample but not in the reference sample can be sequenced using conventional sequencing techniques to identify the subset that bind, thereby identifying an aptamer profile for the particular disease sample. In this way, the aptamer profile provides an individualized platform for detecting disease in other samples that are screened. Furthermore, by selecting an appropriate reference or control sample, the aptamer profile can provide a diagnostic, prognostic and/or theranostic readout for the subject from whom the test sample is obtained.

[0330] In a related aspect, the invention provides a method of selecting a pool of aptamers, comprising: (a) contacting a biological control sample with a pool of oligonucleotides; (b) isolating a first subset of the pool of oligonucleotides that do not bind the biological control sample; (c) contacting the biological test sample with the first subset of the pool of oligonucleotides; and (d) isolating a second subset of the pool of oligonucleotides that bind the biological test sample, thereby selecting the pool of aptamers. The pool of oligonucleotides may comprise any number of desired sequences, e.g., at least 10, 10², 10³, 10⁴, 10⁵, 10⁶, 10⁷, 10⁸, 10⁹, 10¹⁰, 10¹¹, 10¹², 10¹³, 10¹⁴, 10¹⁵, 10¹⁶, 10¹⁷, 10¹⁸, 10¹⁹ or at least 10²⁰ oligonucleotides may be present in the starting pool. Steps (a)-(d) may be repeated to further hone the pool of aptamers. In an embodiment, these steps are repeated at least 1, 2, 3, 4, 5, 6, 7, 8, 9, 10, 11, 12, 13, 14, 15, 16, 17, 18, 19 or at least 20 times.

[0331] As described herein, the biological test sample and biological control sample may comprise microvesicles. In an embodiment, the biological test sample and optionally biological control sample comprise a bodily fluid. The bodily fluid may comprise without limitation peripheral blood, sera, plasma, ascites, urine, cerebrospinal fluid (CSF), sputum, saliva, bone marrow, synovial fluid, aqueous humor, amniotic fluid, cerumen, breast milk, broncheoalveolar lavage fluid, semen, prostatic fluid, Cowper's fluid, pre-ejaculatory fluid, female ejaculate, sweat, fecal matter, hair, tears, cyst fluid, pleural fluid, peritoneal fluid, malignant fluid, pericardial fluid, lymph, chyme, chyle, bile, interstitial fluid, menses, pus, sebum, vomit, vaginal secretions, mucosal secretion, stool water, pancreatic juice, lavage fluids from sinus cavities, bronchopulmonary aspirates or other lavage fluids. The biological test sample and optionally biological control may also comprise a tumor sample, e.g., cells from a tumor or tumor tissue. In other embodiments, the biological test sample and optionally biological control sample comprise a cell culture medium. In embodiments, the biological test sample comprises a diseased sample and the biological control sample comprises a non-diseased sample. Accordingly, the pool of aptamers may be used to provide a diagnostic, prognostic and/or theranostic readout a disease.

[0332] As noted, the invention can be used to assess microvesicles. Microvesicles are powerful biomarkers because the vesicles provide one biological entity that comprises multiple pieces of information. For example as described, a vesicle can have multiple surface antigens, each of which provides complementary information. Consider a cancer marker and a tissue specific marker. If both markers are individually present in a sample, e.g., both are circulating proteins or nucleic acids, it may not be ascertainable whether the cancer marker and the tissue specific marker are derived from the same anatomical locale. However, if both the cancer marker and the tissue specific marker are surface antigens on a single microvesicle, the vesicle itself links the two markers and provides an indication of a disease (via the cancer marker) and origin of the disease (via the tissue specific marker). Furthermore, the vesicle can have any number of surface antigens and also payload that can be assessed. Accordingly, the invention provides a method for identifying binding agents comprising contacting a plurality of extracellular microvesicles with a randomly generated library of binding agents, identifying a subset of the library of binding agents that have an affinity to one or more components of the extracellular microvesicles. The binding agents may comprise aptamers, antibodies, and/or any other useful type of binding agent disclosed herein or known in the art.

[0333] In a related aspect, the invention provides a method for identifying a plurality of target ligands comprising, (a) contacting a reference microvesicle population with a plurality of ligands that are capable of binding one or more microvesicle surface markers, (b) isolating a plurality of reference ligands, wherein the plurality of reference ligands comprise a subset of the plurality of ligands that do not have an affinity for the reference microvesicle population; (c) contacting one or more test microvesicle with the plurality of reference ligands; and (d) identifying a subset of ligands from the plurality of reference ligands that form complexes with a surface marker on the one or more test microvesicle, thereby identifying the plurality of target ligands. The term “ligand” can refer a molecule, or a molecular group, that binds to another chemical entity to form a larger complex. Accordingly, a binding agent comprises a ligand. The plurality of ligands may comprise aptamers, antibodies and/or other useful binding agents described herein or known in the art.

[0334] The invention further provides kits comprising one or more reagent to carry out the methods above. In an embodiment, the one or more reagent comprises a library of potential binding agents that comprises one or more of an aptamer, antibody, and other useful binding agents described herein or known in the art.

### Negative and Positive Aptamer Selection

[0335] Aptamers can be used in various biological assays, including numerous types of assays which rely on a binding agent. For example, aptamers can be used instead of or along side antibodies in immune-based assays. The invention provides an aptamer screening method that identifies aptamers that do not bind to any surfaces (substrates, tubes, filters, beads, other antigens, etc.) throughout the assay steps and bind specifically to an antigen of interest. The assay relies on negative selection to remove aptamers that bind non-target antigen components of the final assay. The negative selection is followed by positive selection to identify aptamers that bind the desired antigen.

[0336] In an aspect, the invention provides a method of identifying an aptamer specific to a target of interest, comprising (a) contacting a pool of candidate aptamers with one or more assay components, wherein the assay components do not comprise the target of interest; (b) recovering the members of the pool of candidate aptamers that do not bind to the one or more assay components in (a); (c) contacting the members of the pool of candidate aptamers recovered in (b) with the target of interest in the presence of one or more confounding target; and (d) recovering a candidate aptamer that binds to the target of interest in step (c), thereby identifying the aptamer specific to the target of interest. In the method, steps (a) and (b) provide negative selection to remove aptamers that bind non-target entities. Conversely, steps (c) and (d) provide positive selection by identifying aptamers that bind the target of interest but not other confounding targets, e.g., other antigens that may be present in a biological sample which comprises the target of interest. The pool of candidate aptamers may comprise at least 10, 10², 10³, 10⁴, 10⁵, 10⁶, 10⁷, 10⁸, 10⁹, 10¹⁰, 10¹¹, 10¹², 10¹³, 10¹⁴, 10¹⁵, 10¹⁶, 10¹⁷, 10¹⁸, 10¹⁹ or at least 10²⁰ nucleic acid sequences. One illustrative approach for performing the method is provided in Example 7.

[0337] In some embodiments, steps (a)-(b) are optional. In other embodiments, steps (a)-(b) are repeated at least 1, 2, 3, 4, 5, 6, 7, 8, 9, 10, 11, 12, 13, 14, 15, 16, 17, 18, 19 or at least 20 times before positive selection in step (c) is performed. The positive selection can also be performed in multiple rounds. Steps (c)-(d) can be repeated at least 1, 2, 3, 4, 5, 6, 7, 8, 9, 10, 11, 12, 13, 14, 15, 16, 17, 18, 19 or at least 20 times before identifying the aptamer specific to the target of interest. Multiple rounds may provide improved stringency of selection.

[0338] In some embodiments, the one or more assay components contacted with the aptamer pool during negative selection comprise one or more of a substrate, a bead, a planar array, a column, a tube, a well, or a filter. One of skill will appreciate that the assay components can include any substance that may be part of a biological assay.

[0339] The target of interest can be any appropriate entity that can be detected when recognized by an aptamer. In an embodiment, the target of interest comprises a protein or polypeptide. As used herein, “protein,” “polypeptide” and “peptide” are used interchangeably unless stated otherwise. The target of interest can be a nucleic acid, including DNA, RNA, and various subspecies of any thereof as disclosed herein or known in the art. The target of interest can comprise a lipid. The target of interest can comprise a carbohydrate. The target of interest can also be a complex, e.g., a complex comprising protein, nucleic acids, lipids and/or carbohydrates. In some embodiments, the target of interest comprises a microvesicle. In such cases, the aptamer can be a binding agent to a microvesicle surface antigen, e.g., a protein. General microvesicle surface antigens include tetraspanin, CD9, CD63, CD81, CD63, CD9, CD81, CD82, CD37, CD53, Rab-5b, Annexin V, and MFG-E8. Additional general microvesicle surface antigens are provided in Table 3 herein.

[0340] The microvesicle surface antigen can also be a biomarker of a disease or disorder. In such cases, the aptamer may be used to provide a diagnosis, prognosis or theranosis of the disease or disorder. For example, the one or more protein may comprise one or more of PSMA, PCSA, B7H3, EpCam, ADAM-10, BCNP, EGFR, IL1B, KLK2, MMP7, p53, PBP, SERPINB3, SPDEF, SSX2, and SSX4. These markers can be used detect a prostate cancer. Additional microvesicle surface antigens are provided in Tables 3-4 herein.

[0341] The one or more confounding target can be an antigen other than the target of interest. For example, a confounding target can be another entity that may be present in a sample to be assayed. As a non-limiting example, consider that the sample to be assessed is a plasma sample from an individual. The target of interest may be a protein, e.g., a microvesicle surface antigen, which is present in the sample. In this case, a confounding target could be selected from any other antigen that is likely to be present in the plasma sample. Accordingly, the positive selection should provide candidate aptamers that recognize the target of interest but have minimal, if any, interactions with the confounding targets. In some embodiments, the target of interest and the one or more confounding target comprise the same type of biological entity, e.g., all protein, all nucleic acid, all carbohydrate, or all lipids. As a non-limiting example, the target of interest can be a protein selected from the group consisting of SSX4, SSX2, PBP, KLK2, SPDEF, and EpCAM, and the one or more confounding target comprises the other members of this group. In other embodiments, the target of interest and the one or more confounding target comprise different types of biological entities, e.g., any combination of protein, nucleic acid, carbohydrate, and lipids. The one or more confounding targets may also comprise different types of biological entities, e.g., any combination of protein, nucleic acid, carbohydrate, and lipids.

[0342] In an embodiment, the invention provides an isolated polynucleotide, or a fragment thereof, identified by the methods above. The invention further provides an isolated polynucleotide having a nucleotide sequence that is at least 60% identical to the nucleotide sequence identified by the methods above. More preferably, the isolated nucleic acid molecule is at least 65%, 70%, 75%, 80%, 85%, 90%, 91%, 92%, 93%, 94%, 95%, 96%, 97%, 98%, 99% or more, identical to the nucleotide sequence identified by the methods above. In the case of an isolated polynucleotide which is longer than or equivalent in length to the reference sequence, e.g., a sequence identified by the methods above, the comparison is made with the full length of the reference sequence. Where the isolated polynucleotide is shorter than the reference sequence, e.g., shorter than a sequence identified by the methods above, the comparison is made to a segment of the reference sequence of the same length (excluding any loop required by the homology calculation).

[0343] In a related aspect, the invention provides a method of selecting a group of aptamers, comprising: (a) contacting a pool of aptamers to a population of microvesicles from a first sample; (b) enriching a subpool of aptamers that show affinity to the population of microvesicles from the first sample; (c) contacting the subpool to a second population of microvesicles from a second sample; and (d) depleting a second subpool of aptamers that show affinity to the second population of microvesicles from the second sample, thereby selecting the group of aptamers that have preferential affinity for the population of microvesicles from the first sample.

[0344] The first sample and/or second sample may comprise a biological fluid such as disclosed herein. For example, the biological fluid may include without limitation blood, a blood derivative, plasma, serum or urine. The first sample and/or second sample may also be derived from a cell culture.

[0345] In an embodiment, the first sample comprises a cancer sample and the second sample comprises a control sample, such as a non-cancer sample. The first sample and/or and the second sample may each comprise a pooled sample. For example, the first sample and/or second sample can comprise bodily fluid from 2, 3, 4, 5, 6, 7, 8, 9, 10, 11, 12, 13, 14, 15, 16, 17, 18, 19, 20, 25, 30, 40, 50, 60, 70, 80, 90, 100 or more than 100 individuals. In such cases, the members of a pool may be chosen to represent a desired phenotype. In a non-limiting example, the members of the first sample pool may be from patients with a cancer and the members of the second sample pool may be from non-cancer controls.

[0346] Steps (a)-(d) can be repeated a desired number of times in order to further enrich the pool in aptamers that have preferential affinity for the population of microvesicles from the first sample. For example, steps (a)-(d) can be repeated 1, 2, 3, 4, 5, 6, 7, 8, 9, 10, 11, 12, 13, 14, 15, 16, 17, 18, 19, 20 or more than 20 times. The output from step (d) can be used as the input to repeated step (a). In embodiment, the first sample and/or second sample are replaced with a different sample before repeating steps (a)-(d). In a non-limiting example, members of a first sample pool may be from patients with a cancer and members of a second sample pool may be from non-cancer controls. During subsequent repetitions of steps (a)-(d), the first sample pool may comprise samples from different cancer patients than in the prior round/s. Similarly, the second sample pool may comprise samples from different controls than in the prior round/s.

[0347] In still another related aspect, the invention provides a method of enriching a plurality of oligonucleotides, comprising: (a) contacting a first microvesicle population with the plurality of oligonucleotides; (b) fractionating the first microvesicle population contacted in step (a) and recovering members of the plurality of oligonucleotides that fractionated with the first microvesicle population; (c) contacting the recovering members of the plurality of oligonucleotides from step (b) with a second microvesicle population; (d) fractionating the second microvesicle population contacted in step (c) and recovering members of the plurality of oligonucleotides that did not fractionate with the second microvesicle population; (e) contacting the recovering members of the plurality of oligonucleotides from step (d) with a third microvesicle population; and (f) fractionating the third microvesicle population contacted in step (a) and recovering members of the plurality of oligonucleotides that fractionated with the third microvesicle population; thereby enriching the plurality of oligonucleotides. The first and third microvesicle populations may have a first phenotype while the second microvesicle population has a second phenotype. Thus, positive selection occurs for the microvesicle populations associated with the first phenotype and negative selection occurs for the microvesicle populations associated with the second phenotype. An example of such selection schemes is described in Example 18 herein, wherein the first phenotype comprises biopsy-positive breast cancer and the second phenotype comprises non-breast cancer (biopsy-negative or healthy).

[0348] In some embodiments, the first phenotype comprises a medical condition, disease or disorder and the second phenotype comprises a healthy state or a different state of the medical condition, disease or disorder. The first phenotype can be a healthy state and the second phenotype comprises a medical condition, disease or disorder. The medical condition, disease or disorder can be any detectable medical condition, disease or disorder, including without limitation a cancer, a premalignant condition, an inflammatory disease, an immune disease, an autoimmune disease or disorder, a cardiovascular disease or disorder, neurological disease or disorder, infectious disease or pain. Various types of such conditions are disclosed herein. See, e.g., Section “Phenotypes” herein.

[0349] Any useful method to isolate microvesicles in whole or in part can be used to fractionate the samples. See, e.g., Section “Microvesicle Isolation and Analysis” herein. In an embodiment, the fractionating comprises ultracentrifugation in step (b) and polymer precipitation in steps (d) and (f). The polymer can be polyethylene glycol (PEG). Any appropriate form of PEG may be used. For example, the PEG may be PEG 8000. The PEG may be used at any appropriate concentration. For example, the PEG can be used at a concentration of 1%, 2%, 3%, 4%, 5%, 6%, 7%, 8%, 9%, 10%, 11%, 12%, 13%, 14% or 15% to isolate the microvesicles. In some embodiments, the PEG is used at a concentration of 6%.

[0350] The contacting can be performed in the presence of a competitor, which may reduce non-specific binding events. Any useful competitor can be used. In an embodiment, the competitor comprises at least one of salmon sperm DNA, tRNA, dextran sulfate and carboxymethyl dextran. As desired, different competitors or competitor concentrations can be used at different contacting steps.

[0351] The method can be repeated to achieve a desired enrichment. In an embodiment, steps (a)-(f) are repeated at least once. These steps can be repeated 1, 2, 3, 4, 5, 6, 7, 8, 9, 10, 11, 12, 13, 14, 15, 16, 17, 18, 19, 20, or more than 20 times as desired. At the same time, each of the contacting steps can be repeated as desired. In some embodiments, the method further comprises: (i) repeating steps (a)-(b) at least once prior to step (c), wherein the recovered members of the plurality of oligonucleotides that fractionated with the first microvesicle population in step (b) are used as the input plurality of oligonucleotides for the repetition of step (a); (ii) repeating steps (c)-(d) at least once prior to step (e), wherein the recovered members of the plurality of oligonucleotides that did not fractionate with the second microvesicle population in step (d) are used as the input plurality of oligonucleotides for the repetition of step (c); and/or (iii) repeating steps (e)-(f) at least once, wherein the recovered members of the plurality of oligonucleotides that fractionated with the third microvesicle population in step (f) are used as the input plurality of oligonucleotides for the repetition of step (e). Repetitions (i)-(iii) can be repeated any desired number of times, e.g., (i)-(iii) can be repeated 1, 2, 3, 4, 5, 6, 7, 8, 9, 10, 11, 12, 13, 14, 15, 16, 17, 18, 19, 20 or more than 20 times. In an embodiment, (i)-(iii) each comprise three repetitions.

[0352] The method may further comprise identifying the members of the selected group of aptamers or oligonucleotides, e.g., by DNA sequencing. The sequencing may be performed by Next Generation sequencing as desired and after or before any desired step in the method.

[0353] The method may also comprise identifying the targets of the selected group of aptamers/oligonucleotides. Methods to identify such targets are disclosed herein.

### Oligonucleotide Probe Target Identification

[0354] The methods and kits above can be used to identify binding agents that differentiate between two biomarker populations. The invention further provides methods of identifying the targets of binding agent. For example, the methods may further comprise identifying a surface marker of a target microvesicle that is recognized by the binding agent.

[0355] In an embodiment, the invention provides a method of identifying a target of a binding agent comprising: (a) contacting the binding agent with the target to bind the target with the binding agent, wherein the target comprises a surface antigen of a microvesicle; (b) disrupting the microvesicle under conditions which do not disrupt the binding of the target with the binding agent; (c) isolating the complex between the target and the binding agent; and (d) identifying the target bound by the binding agent. The binding agent can be a binding agent identified by the methods above, e.g., an aptamer, ligand, antibody, or other useful binding agent that can differentiate between two populations of biomarkers.

[0356] An illustrative schematic for carrying on the method is shown in FIG. 9. The figure shows a binding agent 902, here an oligonucleotide probe or aptamer for purposes of illustration, tethered to a substrate 901. The binding agent 902 can be covalently attached to substrate 901. The binding agent 902 may also be non-covalently attached. For example, binding agent 902 can comprise a label which can be attracted to the substrate, such as a biotin group which can form a complex with an avidin/streptavidin molecule that is covalently attached to the substrate. This can allow a complex to be formed between the aptamer and the microvesicle while in solution, followed by capture of the aptamer using the biotin label. The binding agent 902 binds to a surface antigen 903 of microvesicle 904. In the step signified by arrow (i), the microvesicle is disrupted while leaving the complex between the binding agent 902 and surface antigen 903 intact. Disrupted microvesicle 905 is removed, e.g., via washing or buffer exchange, in the step signified by arrow (ii). In the step signified by arrow (iii), the surface antigen 903 is released from the binding agent 902. The surface antigen 903 can be analyzed to determine its identity using methods disclosed herein and/or known in the art. The target of the method can be any useful biological entity associated with a microvesicle. For example, the target may comprise a protein, nucleic acid, lipid or carbohydrate, or other biological entity disclosed herein or known in the art.

[0357] In some embodiments of the method, the target is cross-linked to the binding agent prior disrupting the microvesicle. Without being bound by theory, this step may assist in maintaining the complex between the binding agent and the target while the vesicle is disrupted. Any useful method of crosslinking disclosed herein or known in the art can be used. In embodiments, the cross-linking comprises photocrosslinking, an imidoester crosslinker, dimethyl suberimidate, an N-Hydroxysuccinimide-ester crosslinker, bissulfosuccinimidyl suberate (BS3), an aldehyde, acrolein, crotonaldehyde, formaldehyde, a carbodiimide crosslinker, N,N′-dicyclohexylcarbodiimide (DDC), N,N′-diisopropylcarbodiimide (DIC), 1-Ethyl-3-[3-dimethylaminopropyl]carbodiimide hydrochloride (EDC or EDAC), Succinimidyl-4-(N-maleimidomethyl)cyclohexane-1-carboxylate (SMCC), a Sulfosuccinimidyl-4-(N-maleimidomethyl)cyclohexane-1-carboxylate (Sulfo-SMCC), a Sulfo-N-hydroxysuccinimidyl-2-(6-[biotinamido]-2-(p-azido benzamido)-hexanoamido) ethyl-1,3′-dithioproprionate (Sulfo-SBED), 2-[N2-(4-Azido-2,3,5,6-tetrafluorobenzoyl)-N6-(6-biotin-amidocaproyl)-L-lysinyl]ethyl methanethiosulfonate (Mts-Atf-Biotin; available from Thermo Fisher Scientific Inc, Rockford IL.), 2-{N2-[N6-(4-Azido-2,3,5,6-tetrafluorobenzoyl-6-amino-caproyl)-N6-(6-biotinamidocaproyl)-L-lysinylamido]}ethyl methanethiosultonate (Mts-Atf-LC-Biotin; available from Thermo Fisher Scientific Inc), a photoreactive amino acid (e.g., L-Photo-Leucine and L-Photo-Methionine, see, e.g., Suchanek, M., et al. (2005). Photo-leucine and photo-methionine allow identification of protein-protein interactions. Nat. Methods 2:261-267), an N-Hydroxysuccinimide (NHS) crosslinker, an NHS-Azide reagent (e.g., NHS-Azide, NHS-PEG4-Azide, NHS-PEG12-Azide; each available from Thermo Fisher Scientific, Inc.), an NHS-Phosphine reagent (e.g., NHS-Phosphine, Sulfo-NHS-Phosphine; each available from Thermo Fisher Scientific, Inc.), or any combination or modification thereof.

[0358] A variety of methods can be used to disrupt the microvesicle. For example, the vesicle membrane can be disrupted using mechanical forces, chemical agents, or a combination thereof. In embodiments, disrupting the microvesicle comprises use of one or more of a detergent, a surfactant, a solvent, an enzyme, or any useful combination thereof. The enzyme may comprise one or more of lysozyme, lysostaphin, zymolase, cellulase, mutanolysin, a glycanase, a protease, and mannase. The detergent or surfactant may comprise one or more of a octylthioglucoside (OTG), octyl beta-glucoside (OG), a nonionic detergent, Triton X, Tween 20, a fatty alcohol, a cetyl alcohol, a stearyl alcohol, cetostearyl alcohol, an oleyl alcohol, a polyoxyethylene glycol alkyl ether (Brij), octaethylene glycol monododecyl ether, pentaethylene glycol monododecyl ether, a polyoxypropylene glycol alkyl ether, a glucoside alkyl ether, decyl glucoside, lauryl glucoside, octyl glucoside, a polyoxyethylene glycol octylphenol ethers, a polyoxyethylene glycol alkylphenol ether, nonoxynol-9, a glycerol alkyl ester, glyceryl laurate, a polyoxyethylene glycol sorbitan alkyl esters, polysorbate, a sorbitan alkyl ester, cocamide MEA, cocamide DEA, dodecyldimethylamine oxide, a block copolymers of polyethylene glycol and polypropylene glycol, poloxamers, polyethoxylated tallow amine (POEA), a zwitterionic detergent, 3-[(3-cholamidopropyl)dimethylammonio]-1-propanesulfonate (CHAPS), a linear alkylbenzene sulfonate (LAS), a alkyl phenol ethoxylate (APE), cocamidopropyl hydroxysultaine, a betaine, cocamidopropyl betaine, lecithin, an ionic detergent, sodium dodecyl sulfate (SDS), cetrimonium bromide (CTAB), cetyl trimethylammonium chloride (CTAC), octenidine dihydrochloride, cetylpyridinium chloride (CPC), benzalkonium chloride (BAC), benzethonium chloride (BZT), 5-Bromo-5-nitro-1,3-dioxane, dimethyldioctadecylammonium chloride, dioctadecyldimethylammonium bromide (DODAB), sodium deoxycholate, nonyl phenoxypolyethoxylethanol (Tergitol-type NP-40; NP-40), ammonium lauryl sulfate, sodium laureth sulfate (sodium lauryl ether sulfate (SLES)), sodium myreth sulfate, an alkyl carboxylate, sodium stearate, sodium lauroyl sarcosinate, a carboxylate-based fluorosurfactant, perfluorononanoate, perfluorooctanoate (PFOA or PFO), and a biosurfactant. Mechanical methods of disruption that can be used comprise without limitation mechanical shear, bead milling, homogenation, microfluidization, sonication, French Press, impingement, a colloid mill, decompression, osmotic shock, thermolysis, freeze-thaw, desiccation, or any combination thereof.

[0359] As shown in FIG. 9, the binding agent may be tethered to a substrate. The binding agent can be tethered before or after the complex between the binding agent and target is formed. The substrate can be any useful substrate such as disclosed herein or known in the art. In an embodiment, the substrate comprises a microsphere. In another embodiment, the substrate comprises a planar substrate. The binding agent can also be labeled. Isolating the complex between the target and the binding agent may comprise capturing the binding agent via the label. For example, the label can be a biotin label. In such cases, the binding agent can be attached to the substrate via a biotin-avidin binding event.

[0360] Methods of identifying the target after release from the binding agent will depend on the type of target of interest. For example, when the target comprises a protein, identifying the target may comprise use of mass spectrometry (MS), peptide mass fingerprinting (PMF; protein fingerprinting), sequencing, N-terminal amino acid analysis, C-terminal amino acid analysis, Edman degradation, chromatography, electrophoresis, two-dimensional gel electrophoresis (2D gel), antibody array, and immunoassay. Nucleic acids can be identified by sequencing.

[0361] One of skill will appreciate that the method can be used to identify any appropriate target, including those not associated with a vesicle. For example, with respect to the FIG. 9, all steps except for the step signified by arrow (i) (i.e., disrupting the microvesicle), could be performed for a circulating target such as a protein, nucleic acid, lipid, carbohydrate, or combination thereof. The target can be any useful target, including without limitation a cell, an organelle, a protein complex, a lipoprotein, a carbohydrate, a microvesicle, a virus, a membrane fragment, a small molecule, a heavy metal, a toxin, a drug, a nucleic acid, mRNA, microRNA, a protein-nucleic acid complex, and various combinations, fragments and/or complexes of any of these.

[0362] In an aspect, the invention provides a method of identifying at least one protein associated with at least one microvesicle in a biological sample, comprising: a) contacting the at least one microvesicle with an oligonucleotide probe library, b) isolating at least one protein bound by at least one member of the oligonucleotide probe library in step a); and c) identifying the at least one protein isolated in step b). The isolating can be performed using any useful method such as disclosed herein, e.g., by immunopreciption or capture to a substrate. Similarly, the identifying can be performed using any useful method such as disclosed herein, including without limitation use of mass spectrometry, 2-D gel electrophoresis or an antibody array. Examples of such methodology are presented herein in Examples 23-25.

[0363] The targets identified by the methods of the invention can be detected, e.g., using the oligonucleotide probes of the invention, for various purposes as desired. For example, an identified microvesicle surface antigen can then be used to detect a microvesicle. In an aspect, the invention provides a method of detecting at least one microvesicle in a biological sample comprising contacting the biological sample with at least one binding agent to at least one microvesicle surface antigen and detecting the at least one microvesicle recognized by the binding agent to the at least one protein. In an embodiment, the at least one microvesicle surface antigen is selected from Tables 3-4 herein. The at least one microvesicle surface antigen can be a protein in any of Tables 18-25. See Example 23. The at least one binding agent may comprise any useful binding agent, including without limitation a nucleic acid, DNA molecule, RNA molecule, antibody, antibody fragment, aptamer, peptoid, zDNA, peptide nucleic acid (PNA), locked nucleic acid (LNA), lectin, peptide, dendrimer, membrane protein labeling agent, chemical compound, or a combination thereof. In some embodiments, the at least one binding agent comprises at least one oligonucleotide, such as an oligonucleotide probe as provided herein.

[0364] The at least one binding agent can be used to capture and/or detect the at least one microvesicle. Methods of detecting biomarkers and microvesicle using binding agents are provided herein. See, e.g., FIGS. 2A-B, which figures describe sandwich assay formats. In some embodiments, the at least one binding agent used to capture the at least one microvesicle is bound to a substrate. Any useful substrate can be used, including without limitation a planar array, a column matrix, or a microbead. See, e.g., FIGS. 2A-B. In some embodiments, the at least one binding agent used to detect the at least one microvesicle is labeled. Various useful labels are provided herein or known in the art, including without limitation a magnetic label, a fluorescent moiety, an enzyme, a chemiluminescent probe, a metal particle, a non-metal colloidal particle, a polymeric dye particle, a pigment molecule, a pigment particle, an electrochemically active species, a semiconductor nanocrystal, a nanoparticle, a quantum dot, a gold particle, a fluorophore, or a radioactive label.

[0365] In an embodiment, the detecting is used to characterize a phenotype. The phenotype can be any appropriate phenotype of interest. In some embodiments, the phenotype is a disease or disorder. The characterizing may comprise providing diagnostic, prognostic and/or theranostic information for the disease or disorder. The characterizing may be performed by comparing a presence or level of the at least one microvesicle to a reference. The reference can be selected per the characterizing to be performed. For example, when the phenotype comprises a disease or disorder, the reference may comprise a presence or level of the at least one microvesicle in a sample from an individual or group of individuals without the disease or disorder. The comparing can be determining whether the presence or level of the microvesicle differs from that of the reference. In some embodiments, the detected at least one microvesicle is found at higher levels in a healthy sample as compared to a diseased sample. In another embodiment, the detected at least one microvesicle is found at higher levels in a diseased sample as compared to a healthy sample. When multiplex assays are performed, e.g., using a plurality of binding agents to different biomarkers, some microvesicle antigens may be observed at a higher level in the biological samples as compared to the reference whereas other microvesicle antigens may be observed at a lower level in the biological samples as compared to the reference.

[0366] The method can be used to detect the at least one microvesicle in any appropriate biological sample. For example, the biological sample may comprise a bodily fluid, tissue sample or cell culture. The bodily fluid or tissue sample can be from a subject having or suspected of having a medical condition, a disease or a disorder. Thus, the method can be used to provide a diagnostic, prognostic, or theranostic read out for the subject. Any appropriate bodily fluid can be used, including without limitation peripheral blood, sera, plasma, ascites, urine, cerebrospinal fluid (CSF), sputum, saliva, bone marrow, synovial fluid, aqueous humor, amniotic fluid, cerumen, breast milk, broncheoalveolar lavage fluid, semen, prostatic fluid, cowper's fluid or pre-ejaculatory fluid, female ejaculate, sweat, fecal matter, hair oil, tears, cyst fluid, pleural and peritoneal fluid, pericardial fluid, lymph, chyme, chyle, bile, interstitial fluid, menses, pus, sebum, vomit, vaginal secretions, mucosal secretion, stool water, pancreatic juice, lavage fluids from sinus cavities, bronchopulmonary aspirates, blastocyl cavity fluid, or umbilical cord blood.

[0367] The method of the invention can be used to detect or characterize any appropriate disease or disorder of interest, including without limitation Breast Cancer, Alzheimer's disease, bronchial asthma, Transitional cell carcinoma of the bladder, Giant cellular osteoblastoclastoma, Brain Tumor, Colorectal adenocarcinoma, Chronic obstructive pulmonary disease (COPD), Squamous cell carcinoma of the cervix, acute myocardial infarction (AMI)/acute heart failure, Chron's Disease, diabetes mellitus type II, Esophageal carcinoma, Squamous cell carcinoma of the larynx, Acute and chronic leukemia of the bone marrow, Lung carcinoma, Malignant lymphoma, Multiple Sclerosis, Ovarian carcinoma, Parkinson disease, Prostate adenocarcinoma, psoriasis, Rheumatoid Arthritis, Renal cell carcinoma, Squamous cell carcinoma of skin, Adenocarcinoma of the stomach, carcinoma of the thyroid gland, Testicular cancer, ulcerative colitis, or Uterine adenocarcinoma.

[0368] In some embodiments, the disease or disorder comprises a cancer, a premalignant condition, an inflammatory disease, an immune disease, an autoimmune disease or disorder, a cardiovascular disease or disorder, neurological disease or disorder, infectious disease or pain. The cancer can include without limitation one of acute lymphoblastic leukemia; acute myeloid leukemia; adrenocortical carcinoma; AIDS-related cancers; AIDS-related lymphoma; anal cancer; appendix cancer; astrocytomas; atypical teratoid/rhabdoid tumor; basal cell carcinoma; bladder cancer; brain stem glioma; brain tumor (including brain stem glioma, central nervous system atypical teratoid/rhabdoid tumor, central nervous system embryonal tumors, astrocytomas, craniopharyngioma, ependymoblastoma, ependymoma, medulloblastoma, medulloepithelioma, pineal parenchymal tumors of intermediate differentiation, supratentorial primitive neuroectodermal tumors and pineoblastoma); breast cancer; bronchial tumors; Burkitt lymphoma; cancer of unknown primary site; carcinoid tumor; carcinoma of unknown primary site; central nervous system atypical teratoid/rhabdoid tumor; central nervous system embryonal tumors; cervical cancer; childhood cancers; chordoma; chronic lymphocytic leukemia; chronic myelogenous leukemia; chronic myeloproliferative disorders; colon cancer; colorectal cancer; craniopharyngioma; cutaneous T-cell lymphoma; endocrine pancreas islet cell tumors; endometrial cancer; ependymoblastoma; ependymoma; esophageal cancer; esthesioneuroblastoma; Ewing sarcoma; extracranial germ cell tumor; extragonadal germ cell tumor; extrahepatic bile duct cancer; gallbladder cancer; gastric (stomach) cancer; gastrointestinal carcinoid tumor; gastrointestinal stromal cell tumor; gastrointestinal stromal tumor (GIST); gestational trophoblastic tumor; glioma; hairy cell leukemia; head and neck cancer; heart cancer; Hodgkin lymphoma; hypopharyngeal cancer; intraocular melanoma; islet cell tumors; Kaposi sarcoma; kidney cancer; Langerhans cell histiocytosis; laryngeal cancer; lip cancer; liver cancer; lung cancer; malignant fibrous histiocytoma bone cancer; medulloblastoma; medulloepithelioma; melanoma; Merkel cell carcinoma; Merkel cell skin carcinoma; mesothelioma; metastatic squamous neck cancer with occult primary; mouth cancer; multiple endocrine neoplasia syndromes; multiple myeloma; multiple myeloma/plasma cell neoplasm; mycosis fungoides; myelodysplastic syndromes; myeloproliferative neoplasms; nasal cavity cancer; nasopharyngeal cancer; neuroblastoma; Non-Hodgkin lymphoma; nonmelanoma skin cancer; non-small cell lung cancer; oral cancer; oral cavity cancer; oropharyngeal cancer; osteosarcoma; other brain and spinal cord tumors; ovarian cancer; ovarian epithelial cancer; ovarian germ cell tumor; ovarian low malignant potential tumor; pancreatic cancer; papillomatosis; paranasal sinus cancer; parathyroid cancer; pelvic cancer; penile cancer; pharyngeal cancer; pineal parenchymal tumors of intermediate differentiation; pineoblastoma; pituitary tumor; plasma cell neoplasm/multiple myeloma; pleuropulmonary blastoma; primary central nervous system (CNS) lymphoma; primary hepatocellular liver cancer; prostate cancer; rectal cancer; renal cancer; renal cell (kidney) cancer; renal cell cancer; respiratory tract cancer; retinoblastoma; rhabdomyosarcoma; salivary gland cancer; Sézary syndrome; small cell lung cancer; small intestine cancer; soft tissue sarcoma; squamous cell carcinoma; squamous neck cancer; stomach (gastric) cancer; supratentorial primitive neuroectodermal tumors; T-cell lymphoma; testicular cancer; throat cancer; thymic carcinoma; thymoma; thyroid cancer; transitional cell cancer; transitional cell cancer of the renal pelvis and ureter; trophoblastic tumor; ureter cancer; urethral cancer; uterine cancer; uterine sarcoma; vaginal cancer; vulvar cancer; Waldenström macroglobulinemia; or Wilm's tumor. The premalignant condition can include without limitation Barrett's Esophagus. The autoimmune disease can include without limitation one of inflammatory bowel disease (IBD), Crohn's disease (CD), ulcerative colitis (UC), pelvic inflammation, vasculitis, psoriasis, diabetes, autoimmune hepatitis, multiple sclerosis, myasthenia gravis, Type I diabetes, rheumatoid arthritis, psoriasis, systemic lupus erythematosis (SLE), Hashimoto's Thyroiditis, Grave's disease, Ankylosing Spondylitis Sjogrens Disease, CREST syndrome, Scleroderma, Rheumatic Disease, organ rejection, Primary Sclerosing Cholangitis, or sepsis. The cardiovascular disease can include without limitation one of atherosclerosis, congestive heart failure, vulnerable plaque, stroke, ischemia, high blood pressure, stenosis, vessel occlusion or a thrombotic event. The neurological disease can include without limitation one of Multiple Sclerosis (MS), Parkinson's Disease (PD), Alzheimer's Disease (AD), schizophrenia, bipolar disorder, depression, autism, Prion Disease, Pick's disease, dementia, Huntington disease (HD), Down's syndrome, cerebrovascular disease, Rasmussen's encephalitis, viral meningitis, neurospsychiatric systemic lupus erythematosus (NPSLE), amyotrophic lateral sclerosis, Creutzfeldt-Jacob disease, Gerstmann-Straussler-Scheinker disease, transmissible spongiform encephalopathy, ischemic reperfusion damage (e.g. stroke), brain trauma, microbial infection, or chronic fatigue syndrome. The pain can include without limitation one of fibromyalgia, chronic neuropathic pain, or peripheral neuropathic pain. The infectious disease can include without limitation one of a bacterial infection, viral infection, yeast infection, Whipple's Disease, Prion Disease, cirrhosis, methicillin-resistant Staphylococcus aureus, HIV, HCV, hepatitis, syphilis, meningitis, malaria, tuberculosis, or influenza. One of skill will appreciate that oligonucleotide probes or plurality of oligonucleotides or methods of the invention can be used to assess any number of these or other related diseases and disorders.

[0369] In a related aspect, the invention provides a kit comprising a reagent for carrying out the methods herein. In still another related aspect, the invention provides for use of a reagent for carrying out the methods. The reagent may comprise at least one binding agent to the at least one protein. The binding agent may be an oligonucleotide probe as provided herein.

### Sample Characterization

[0370] The aptamers of the invention can be used to characterize a biological sample. For example, an aptamer can be used to bind a biomarker in the sample. The presence or level of the bound biomarker can indicate a characteristic of the example, such as a diagnosis, prognosis or theranosis of a disease or disorder associated with the sample.

[0371] In an aspect, the invention provides an aptamer comprising a nucleic acid sequence that is at least about 50, 55, 60, 65, 70, 75, 80, 85, 90, 95, 96, 97, 98, 99 or 100 percent homologous of any of: a) SEQ ID NOs. 11-24 or a sequence in Table 8; a) SEQ ID NOs. 25-44 or a sequence in Table 11; b) SEQ ID NOs. 47-130 or a sequence in Table 12; or c) a functional variation or fragment of any preceding sequence. A functional variation or fragment includes a sequence comprising modifications that is still capable of binding a target molecule, wherein the modifications comprise without limitation at least one of a deletion, insertion, point mutation, truncation or chemical modification. In a related aspect, the invention provides a method of characterizing a disease or disorder, comprising: (a) contacting a biological test sample with one or more aptamer of the invention, e.g., any of those in this paragraph or modifications thereof; (b) detecting a presence or level of a complex between the one or more aptamer and the target bound by the one or more aptamer in the biological test sample formed in step (a); (c) contacting a biological control sample with the one or more aptamer; (d) detecting a presence or level of a complex between the one or more aptamer and the target bound by the one or more aptamer in the biological control sample formed in step (c); and (e) comparing the presence or level detected in steps (b) and (d), thereby characterizing the disease or disorder.

[0372] The biological test sample and biological control sample can each comprise a tissue sample, a cell culture, or a biological fluid. In some embodiments, the biological test sample and biological control sample comprise the same sample type, e.g., both are tissue samples or both are fluid samples. In other embodiments, different sample types may be used for the test and control samples. For example, the control sample may comprise an engineered or otherwise artificial sample.

[0373] The biological fluid may comprise a bodily fluid. The bodily fluid may include without limitation one or more of peripheral blood, sera, plasma, ascites, urine, cerebrospinal fluid (CSF), sputum, saliva, bone marrow, synovial fluid, aqueous humor, amniotic fluid, cerumen, breast milk, broncheoalveolar lavage fluid, semen, prostatic fluid, cowper's fluid or pre-ejaculatory fluid, female ejaculate, sweat, fecal matter, hair, tears, cyst fluid, pleural and peritoneal fluid, pericardial fluid, lymph, chyme, chyle, bile, interstitial fluid, menses, pus, sebum, vomit, vaginal secretions, mucosal secretion, stool water, pancreatic juice, lavage fluids from sinus cavities, bronchopulmonary aspirates, blastocyl cavity fluid, or umbilical cord blood. In some embodiments, the bodily fluid comprises blood, serum or plasma.

[0374] The biological fluid may comprise microvesicles. For example, the biological fluid can be a tissue, cell culture, or bodily fluid which comprises microvesicles released from cells in the sample. The microvesicles can be circulating microvesicles.

[0375] The one or more aptamer can bind a target biomarker, e.g., a biomarker useful in characterizing the sample. The biomarker may comprise a polypeptide or fragment thereof, or other useful biomarker described herein or known in the art (lipid, carbohydrate, complex, nucleic acid, etc). In embodiments, the polypeptide or fragment thereof is soluble or membrane bound. Membrane bound polypeptides may comprise a cellular surface antigen or a microvesicle surface antigen. The biomarker can be a biomarker selected from Table 3 or Table 4.

[0376] The characterizing can comprises a diagnosis, prognosis or theranosis of the disease or disorder. Various diseases and disorders can be characterized using the compositions and methods of the invention, including without limitation a cancer, a premalignant condition, an inflammatory disease, an immune disease, an autoimmune disease or disorder, a cardiovascular disease or disorder, a neurological disease or disorder, an infectious disease, and/or pain. See, e.g., section herein “Phenotypes” for further details. In embodiments, the disease or disorder comprises a proliferative or neoplastic disease or disorder. For example, the disease or disorder can be a cancer. In some embodiments, the cancer comprises a breast cancer, ovarian cancer, prostate cancer, lung cancer, colorectal cancer, melanoma, or brain cancer.

[0377] FIG. 19A is a schematic 1900 showing an assay configuration that can be used to detect and/or quantify a target of interest using one or more aptamer of the invention. Capture aptamer 1902 is attached to substrate 1901. The substrate can be a planar substrate, well, microbead, or other useful substrate as disclosed herein or known in the art. Target of interest 1903 is bound by capture aptamer 1902. The target of interest can be any appropriate entity that can be detected when recognized by an aptamer or other binding agent. The target of interest may comprise a protein or polypeptide, a nucleic acid, including DNA, RNA, and various subspecies thereof, a lipid, a carbohydrate, a complex, e.g., a complex comprising protein, nucleic acids, lipids and/or carbohydrates. In some embodiments, the target of interest comprises a microvesicle. The target of interest can be a microvesicle surface antigen. The target of interest may be a biomarker, including a vesicle associated biomarker, in Tables 3 or 4. The microvesicle input can be isolated from a sample using various techniques as described herein, e.g., chromatography, filtration, centrifugation, flow cytometry, affinity capture (e.g., to a planar surface, column or bead), and/or using microfluidics. Detection aptamer 1904 is also bound to target of interest 1903. Detection aptamer 1904 carries label 1905 which can be detected to identify target captured to substrate 1901 via capture aptamer 1902. The label can be a fluorescent, radiolabel, enzyme, or other detectable label as disclosed herein. Either capture aptamer 1902 or detection aptamer 1904 can be substituted with another binding agent, e.g., an antibody. For example, the target may be captured with an antibody and detected with an aptamer, or vice versa. When the target of interest comprises a complex, the capture and detection agents (aptamer, antibody, etc) can recognize the same or different targets. For example, when the target is a microvesicle, the capture agent may recognize one microvesicle surface antigen while the detection agent recognizes another microvesicle surface antigen. Alternately, the capture and detection agents can recognize the same surface antigen.

[0378] The aptamers of the invention may be identified and/or used for various purposes in the form of DNA or RNA. Unless otherwise specified, one of skill in the art will appreciate that an aptamer may generally be synthesized in various forms of nucleic acid. The aptamers may also carry various chemical modifications and remain within the scope of the invention.

[0379] In some embodiments, an aptamer of the invention is modified to comprise at least one chemical modification. The modification may include without limitation a chemical substitution at a sugar position; a chemical substitution at a phosphate position; and a chemical substitution at a base position of the nucleic acid. In some embodiments, the modification is selected from the group consisting of: biotinylation, incorporation of a fluorescent label, incorporation of a modified nucleotide, a 2-modified pyrimidine, 3′ capping, conjugation to an amine linker, conjugation to a high molecular weight, non-immunogenic compound, conjugation to a lipophilic compound, conjugation to a drug, conjugation to a cytotoxic moiety, and labeling with a radioisotope, or other modification as disclosed herein. The position of the modification can be varied as desired. For example, the biotinylation, fluorescent label, or cytotoxic moiety can be conjugated to the 5′ end of the aptamer. The biotinylation, fluorescent label, or cytotoxic moiety can also be conjugated to the 3′ end of the aptamer.

[0380] In some embodiments, the cytotoxic moiety is encapsulated in a nanoparticle. The nanoparticle can be selected from the group consisting of: liposomes, dendrimers, and comb polymers. In other embodiments, the cytotoxic moiety comprises a small molecule cytotoxic moiety. The small molecule cytotoxic moiety can include without limitation vinblastine hydrazide, calicheamicin, vinca alkaloid, a cryptophycin, a tubulysin, dolastatin-10, dolastatin-15, auristatin E, rhizoxin, epothilone B, epithilone D, taxoids, maytansinoids and any variants and derivatives thereof. In still other embodiments, the cytotoxic moiety comprises a protein toxin. For example, the protein toxin can be selected from the group consisting of diphtheria toxin, ricin, abrin, gelonin, and Pseudomonas exotoxin A. Non-immunogenic, high molecular weight compounds for use with the invention include polyalkylene glycols, e.g., polyethylene glycol. Appropriate radioisotopes include yttrium-90, indium-111, iodine-131, lutetium-177, copper-67, rhenium-186, rhenium-188, bismuth-212, bismuth-213, astatine-211, and actinium-225. The aptamer may be labeled with a gamma-emitting radioisotope.

[0381] In some embodiments of the invention, an active agent is conjugated to the aptamer. For example, the active agent may be a therapeutic agent or a diagnostic agent. The therapeutic agent may be selected from the group consisting of tyrosine kinase inhibitors, kinase inhibitors, biologically active agents, biological molecules, radionuclides, adriamycin, ansamycin antibiotics, asparaginase, bleomycin, busulphan, cisplatin, carboplatin, carmustine, capecotabine, chlorambucil, cytarabine, cyclophosphamide, camptothecin, dacarbazine, dactinomycin, daunorubicin, dexrazoxane, docetaxel, doxorubicin, etoposide, epothilones, floxuridine, fludarabine, fluorouracil, gemcitabine, hydroxyurea, idarubicin, ifosfamide, irinotecan, lomustine, mechlorethamine, mercaptopurine, melphalan, methotrexate, rapamycin (sirolimus), mitomycin, mitotane, mitoxantrone, nitrosurea, paclitaxel, pamidronate, pentostatin, plicamycin, procarbazine, rituximab, streptozocin, teniposide, thioguanine, thiotepa, taxanes, vinblastine, vincristine, vinorelbine, taxol, combretastatins, discodermolides, transplatinum, anti-vascular endothelial growth factor compounds (“anti-VEGFs”), anti-epidermal growth factor receptor compounds (“anti-EGFRs”), 5-fluorouracil and derivatives, radionuclides, polypeptide toxins, apoptosis inducers, therapy sensitizers, enzyme or active fragment thereof, and combinations thereof.

### Oligonucleotide Pools to Characterize a Sample

[0382] The complexity and heterogeneity present in biology challenges the understanding of biological systems and disease. Diversity exists at various levels, e.g., within and between cells, tissues, individuals and disease states. See, e.g., FIG. 20A. FIG. 20B overviews various biological entities that can be assessed to characterize such samples. As shown in the Figure, as one moves from assessing DNA, to RNA, to protein, and finally to protein complexes, the amount of diversity and complexity increases dramatically. The oligonucleotide probe library method of the invention can be used characterize complex biological sources, e.g., tissue samples, cells, circulating tumor cells, microvesicles, and complexes such as protein and proteolipid complexes.

[0383] Current methods to characterize biological samples may not adequately address such complexity and diversity. As shown in FIG. 20C, such current methods often have a trade off between measuring diversity and complexity. As an example, consider high throughput sequencing technology. Next generation approaches may query many 1000s of molecular targets in a single assay. However, such approaches only probe individual DNA and/or RNA molecules, and thus miss out on the great diversity of proteins and biological complexes. On the other hand, flow cytometry can probe biological complexes, but are limited to a small number of pre-defined ligands. For example, a single assay can probe a handful of differentially labeled antibodies to pre-defined targets.

[0384] The oligonucleotide probe library of the invention address the above challenges with current biological detection technologies. The size of the starting library can be adjusted to measure as many different entities as there are library members. In this Example, the initial untrained oligonucleotide library has the potential to measure 10¹² or more biological features. A larger and/or different library can be constructed as desired. The technology is adapted to find differences between samples without assumptions about what “should be different.” For example, the probe library may distinguish based on individual proteins, protein modifications, protein complexes, lipids, nucleic acids, different folds or conformations, or whatever is there that distinguishes a sample of interest. Thus, the method provides an unbiased approach to identify differences in biological samples that can be used to identify different populations of interest.

[0385] In the context herein, the use of the oligonucleotide library probe to assess a sample may be referred to as Adaptive Dynamic Artificial Poly-ligand Targeting, or ADAPT™ (previously referred to as Topological Oligonucleotide Profiling: TOP™). Although as noted the terms aptamer and oligonucleotides are typically used interchangeable herein, some differences between “classic” individual aptamers and ADAPT probes are as follows. Individual aptamers may comprise individual oligonucleotides selected to bind to a known specific target in an antibody-like “key-in-lock” binding mode. They may be evaluated individually based on specificity and binding affinity to the intended target. However, ADAPT probes may comprise a library of oligonucleotides intended to produce multi-probe signatures. The ADAPT probes comprise numerous potential binding modalities (electrostatic, hydrophobic, Watson-Crick, multi-oligo complexes, etc.). The ADAPT probe signatures have the potential to identify heterogeneous patient subpopulations. For example, a single ADAPT probe library can be assembled to differentiate multiple disease states, as demonstrated herein. Unlike classic single aptamers, the binding targets may or may not be isolated or identified. It will be understood that screening methods that identify individual aptamers, e.g., SELEX, can also be used to enrich a naïve library of oligonucleotides to identify a ADAPT probe library.

[0386] The general method of the invention is outlined in FIG. 20D. One input to the method comprises a randomized oligonucleotide library with the potential to measure 10¹² or more biological features. As outlined in the figure, the method identifies a desired number (e.g., ˜10⁵-10⁶) that are different between two input sample types. The randomized oligonucleotide library is contacted with a first and a second sample type, and oligonucleotides that bind to each sample are identified. The bound oligonucleotide populations are compared and oligonucleotides that specifically bind to one or the other biological input sample are retained for the oligonucleotide probe library, whereas oligonucleotides that bind both biological input samples are discarded. This trained oligonucleotide probe library can then be contacted with a new test sample and the identities of oligonucleotides that bind the test sample are determined. The test sample is characterized based on the profile of oligonucleotides that bound. See, e.g., FIG. 20H.

[0387] Extracellular vesicles provide an attractive vehicle to profile the biological complexity and diversity driven by many inter-related sources. There can be a great deal of heterogeneity between patient-to-patient microvesicle populations, or even in microvesicle populations from a single patient under different conditions (e.g., stress, diet, exercise, rest, disease, etc). Diversity of molecular phenotypes within microvesicle populations in various disease states, even after microvesicle isolation and sorting by vesicle biomarkers, can present challenges identifying surface binding ligands. This situation is further complicated by vesicle surface-membrane protein complexes. The oligonucleotide probe library can be used to address such challenges and allow for characterization of biological phenotypes. The approach combines the power of diverse oligonucleotide libraries and high throughput (next-generation) sequencing technologies to probe the complexity of extracellular microvesicles. See FIG. 20E.

[0388] ADAPT™ profiling may provide quantitative measurements of dynamic events in addition to detection of presence/absence of various biomarkers in a sample. For example, the binding probes may detect protein complexes or other post-translation modifications, allowing for differentiation of samples with the same proteins but in different biological configurations. Such configurations are illustrated in FIGS. 20F-G. In FIG. 20F, microvesicles with various surface markers are shown from an example microvesicle sample population: Sample Population A. The indicated Bound Probing Oligonucleotides 2001 are contacted to two surface markers 2002 and 2003 in a given special relationship. Here, probes unique to these functional complexes and spatial relationships may be retained. In contrast, in microvesicle Sample Population B shown in FIG. 20F, the two surface markers 2002 and 2003 are found in disparate spacial relationship. Here, probes 2001 are not bound due to absence of the spatial relationship of the interacting components 2002 and 2003.

[0389] An illustrative approach 2010 for using ADAPT profiling to assess a sample is shown in FIG. 20H. The probing library 2011 is mixed with sample 2012. The sample can be as described herein, e.g., a bodily fluid from a subject having or suspected of having a disease. The probes are allowed to bind the sample 2020 and the microvesicles are pelleted 2015. The supernatant 2014 comprising unbound oligonucleotides is discarded. Oligonucleotide probes bound to the pellet 2015 are eluted 2016 and sequenced 2017. The profile 2018 generated by the bound oligonucleotide probes as determined by the sequencing 2017 is used to characterize the sample 2012. For example, the profile 2018 can be compared to a reference, e.g., to determine if the profile is similar or different from a reference profile indicative of a disease or healthy state, or other phenotypic characterization of interest. The comparison may indicate the presence of a disease, provide a diagnosis, prognosis or theranosis, or otherwise characterize a phenotype associated with the sample 2012. FIG. 20I illustrates another schematic for using TOP™ profiling to characterize a phenotype. A patient sample such as a bodily fluid disclosed herein is collected 2021. The sample is contacted with the ADAPT™ library pool 2022. Microvesicles (MVs) are isolated from the contacted sample 2023, e.g., using ultracentrifugation, filtration, polymer precipitation or other appropriate technique or combination of techniques disclosed herein. Oligonucleotides that bound the isolated microvesicles are collected and identity is determined 2024. The identity of the bound oligonucleotides can be determined by any useful technique such as sequencing, high throughput sequencing (e.g., NGS), amplification including without limitation qPCR, or hybridization such as to a planar or particle based array. The identity of the bound oligonucleotides is used to characterize the sample, e.g., as containing disease related microvesicles.

[0390] In an aspect, the invention provides a method of characterizing a sample by contacting the sample with a pool of different oligonucleotides (e.g., an aptamer pool), and determining the frequency at which various oligonucleotides in the pool bind the sample. For example, a pool of oligonucleotides is identified that preferentially bind to microvesicles from cancer patients as compared to non-cancer patients. A test sample, e.g., from a patient suspected of having the cancer, is collected and contacted with the pool of oligonucleotides. Oligonucleotides that bind the test sample are eluted from the test sample, collected and identified, and the composition of the bound oligonucleotides is compared to those known to bind cancer samples. Various sequencing, amplification and hybridization techniques can be used to identify the eluted oligonucleotides. For example, when a large pool of oligonucleotides is used, oligonucleotide identification can be performed by high throughput methods such as next generation sequencing or via hybridization. If the test sample is bound by the oligonucleotide pool in a similar manner (e.g., as determined by bioinformatics classification methods) to the microvesicles from cancer patients, then the test sample is indicative of cancer as well. Using this method, a pool of oligonucleotides that bind one or more microvesicle antigen can be used to characterize the sample without necessarily knowing the precise target of each member of the pool of oligonucleotides. Examples 26-30 and others herein illustrate embodiments of the invention.

[0391] In an aspect, the invention provides a method for characterizing a condition for a test sample comprising: contacting a microvesicle sample with a plurality of oligonucleotide capable of binding one or more target(s) present in said microvesicle sample, identifying a set of oligonucleotides that form a complex with the sample wherein the set is predetermined to characterize a condition for the sample, thereby characterizing a condition for a sample.

[0392] In an related aspect, the invention provides a method for identifying a set of oligonucleotides associated with a test sample, comprising: (a) contacting a microvesicle sample with a plurality of oligonucleotides, isolating a set of oligonucleotides that form a complex with the microvesicle sample, (b) determining sequence and/or copy number for each of the oligonucleotides, thereby identifying a set of oligonucleotides associated with the test sample.

[0393] In still another related aspect, the invention provides a method of diagnosing a sample as cancerous or predisposed to be cancerous, comprising contacting a microvesicle sample with a plurality of oligonucleotides that are predetermined to preferentially form a complex with microvesicles from a cancer sample as compared to microvesicles from a non-cancer sample.

[0394] The oligonucleotides can be identified by sequencing, e.g., by dye termination (Sanger) sequencing or high throughput methods. High throughput methods can comprise techniques to rapidly sequence a large number of nucleic acids, including next generation techniques such as Massively parallel signature sequencing (MPSS; Polony sequencing; 454 pyrosequencing; Illumina (Solexa) sequencing; SOLiD sequencing; Ion Torrent semiconductor sequencing; DNA nanoball sequencing; Heliscope single molecule sequencing; Single molecule real time (SMRT) sequencing, or other methods such as Nanopore DNA sequencing; Tunnelling currents DNA sequencing; Sequencing by hybridization; Sequencing with mass spectrometry; Microfluidic Sanger sequencing; Microscopy-based techniques; RNAP sequencing; In vitro virus high-throughput sequencing. The oligonucleotides may also be identified by hybridization techniques. For example, a microarray having addressable locals to hybridize and thereby detect the various members of the pool can be used. Alternately, detection can be based on one or more differentially labelled oligonucleotides that hybridize with various members of the oligonucleotide pool. The detectable signal of the label can be associated with a nucleic acid molecule that hybridizes with a stretch of nucleic acids present in various oligonucleotides. The stretch can be the same or different as to one or more oligonucleotides in a library. The detectable signal can comprise fluorescence agents, including color-coded barcodes which are known, such as in U.S. Patent Application Pub. No. 20140371088, 2013017837, and 20120258870. Other detectable labels (metals, radioisotopes, etc) can be used as desired.

[0395] The plurality or pool of oligonucleotides can comprise any desired number of oligonucleotides to allow characterization of the sample. In various embodiments, the pool comprises at least 2, 3, 4, 5, 6, 7, 8, 9, 10, 11, 12, 13, 14, 15, 16, 17, 18, 19, 20, 25, 30, 40, 50, 60, 70, 80, 90, 100, 150, 200, 250, 300, 350, 400, 450, 500, 600, 700, 800, 900, 1000, 2000, 3000, 4000, 5000, 6000, 7000, 8000, 9000, or at least 10000 different oligonucleotide members.

[0396] The plurality of oligonucleotides can be pre-selected through one or more steps of positive or negative selection, wherein positive selection comprises selection of oligonucleotides against a sample having substantially similar characteristics compared to the test sample, and wherein negative selection comprises selection of oligonucleotides against a sample having substantially different characteristics compared to the test sample. Substantially similar characteristics mean that the samples used for positive selection are representative of the test sample in one or more characteristic of interest. For example, the samples used for positive selection can be from cancer patients or cell lines and the test sample can be a sample from a patient having or suspected to have a cancer. Substantially different characteristics mean that the samples used for negative selection differ from the test sample in one or more characteristic of interest. For example, the samples used for negative selection can be from individuals or cell lines that do not have cancer (e.g., “normal” or otherwise “control” samples) and the test sample can be a sample from a patient having or suspected to have a cancer. The cancer can be a breast cancer, ovarian cancer, prostate cancer, lung cancer, colorectal cancer, melanoma, brain cancer, or other cancer.

[0397] By selecting samples representative of the desired phenotypes to detect and/or distinguish, the characterizing can comprise a diagnosis, prognosis or theranosis for any number of diseases or disorders. Various diseases and disorders can be characterized using the compositions and methods of the invention, including without limitation a cancer, a premalignant condition, an inflammatory disease, an immune disease, an autoimmune disease or disorder, a cardiovascular disease or disorder, a neurological disease or disorder, an infectious disease, and/or pain. See, e.g., section herein “Phenotypes” for further details. In embodiments, the disease or disorder comprises a proliferative or neoplastic disease or disorder. For example, the disease or disorder can be a cancer. In some embodiments, the cancer comprises a breast cancer, ovarian cancer, prostate cancer, lung cancer, colorectal cancer, melanoma, or brain cancer.

[0398] FIG. 19B is a schematic 1910 showing use of an oligonucleotide pool to characterize a phenotype of a sample, such as those listed above. A pool of oligonucleotides to a target of interest is provided 1911. For example, the pool of oligonucleotides can be enriched to target one or more microvesicle. The members of the pool may bind different targets (e.g., a microvesicle surface antigen) or different epitopes of the same target present on the one or more microvesicle. The pool is contacted with a test sample to be characterized 1912. For example, the test sample may be a biological sample from an individual having or suspected of having a given disease or disorder. The mixture is washed to remove unbound oligonucleotides. The remaining oligonucleotides are eluted or otherwise disassociated from the sample and collected 1913. The collected oligonucleotides are identified, e.g., by sequencing or hybridization 1914. The presence and/or copy number of the identified is used to characterize the phenotype 1915. For example, the pool of oligonucleotides may be chosen as oligonucleotides that preferentially recognize microvesicles shed from cancer cells. The method can be employed to detect whether the sample retains oligonucleotides that bind the cancer-related microvesicles, thereby allowing the sample to be characterized as cancerous or not.

[0399] FIG. 19C is a schematic 1920 showing an implementation of the method in FIG. 19B. A pool of oligonucleotides identified as binding a microvesicle population is provided 1919. The input sample comprises a test sample comprising microvesicles 1922. For example, the test sample may be a biological sample from an individual having or suspected of having a given disease or disorder. The pool is contacted with the isolated microvesicles to be characterized 1923. The microvesicle population can be isolated before or after the contacting 1923 from the sample using various techniques as described herein, e.g., chromatography, filtration, ultrafiltration, centrifugation, ultracentrifugation, flow cytometry, affinity capture (e.g., to a planar surface, column or bead), polymer precipitation, and/or using microfluidics. The mixture is washed to remove unbound oligonucleotides and the remaining oligonucleotides are eluted or otherwise disassociated from the sample and collected 1924. The collected oligonucleotides are identified 1925 and the presence and/or copy number of the retained oligonucleotides is used to characterize the phenotype 1926 as above.

[0400] As noted, in embodiment of FIG. 19C, the pool of oligonucleotides 1919 is directly contacted with a biological sample that comprises or is expected to comprise microvesicles. Microvesicles are thereafter isolated from the sample and the mixture is washed to remove unbound oligonucleotides and the remaining oligonucleotides are disassociated and collected 1924. The following steps are performed as above. As an example of this alternate configuration, a biological sample, e.g., a blood, serum or plasma sample, is directly contacted with the pool of oligonucleotides. Microvesicles are then isolated by various techniques disclosed herein, including without limitation ultracentrifugation, ultrafiltration, flow cytometry, affinity isolation, polymer precipitation, chromatography, various combinations thereof, or the like. Remaining oligonucleotides are then identified, e.g., by sequencing, hybridization or amplification.

[0401] In a related aspect, the invention provides a composition of matter comprising a plurality of oligonucleotides that can be used to carry out the methods comprising use of an oligonucleotide pool to characterize a phenotype. The plurality of oligonucleotides can comprise any of those described herein.

[0402] In a related aspect, the invention provides a method of performing high-throughput sequencing comprising: performing at least one (i) negative selection or (ii) one positive selection of a plurality of oligonucleotides with a microvesicle sample; obtaining a set of oligonucleotides to provide a negative binder subset or positive binder subset of the plurality of oligonucleotides, wherein the negative binder subset of the plurality of oligonucleotides does not bind the microvesicle sample and wherein the positive binder subset of the plurality of oligonucleotides does bind the microvesicle sample; contacting the negative binder subset or positive binder subset with a test sample; eluting oligonucleotides that bound to the test sample to provide a plurality of eluate oligonucleotides; and performing high-throughput sequencing of the plurality of eluate oligonucleotides to identify sequence and/or copy number of the members of the plurality of eluate oligonucleotides. Negative and positive selection of the plurality of oligonucleotides using microvesicle sample can be performed as disclosed herein. The oligonucleotide profile revealed by the sequence and/or copy number of the members of the plurality of eluate oligonucleotides can be used to characterize a phenotype of the test sample as described herein.

[0403] In a similar aspect, the invention provides a method for identifying oligonucleotides specific for a test sample. The method comprises: (a) enriching a plurality of oligonucleotides for a sample to provide a set of oligonucleotides predetermined to form a complex with a target sample; (b) contacting the plurality in (a) with a test sample to allow formation of complexes of oligonucleotides with test sample; (c) recovering oligonucleotides that formed complexes in (b) to provide a recovered subset of oligonucleotides; and (d) profiling the recovered subset of oligonucleotides by high-throughput sequencing or hybridization, thereby identifying oligonucleotides specific for a test sample. The test sample may comprise a plurality of microvesicles. The oligonucleotides may comprise RNA, DNA or both. In some embodiment, the method further comprises performing informatics analysis to identify a subset of oligonucleotides comprising sequence identity of at least 50%, 55%, 60%, 65%, 70%, 75%, 80%, 85%, 90%, 91%, 92%, 93%, 94%, 95%, 96%, 97%, 98%, or at least 99% to the oligonucleotides predetermined to form a complex with the target sample.

[0404] One of skill will appreciate that the method can be used to identify any appropriate target, including those not associated with a microvesicle. The target can be any useful target, including without limitation a cell, an organelle, a protein complex, a lipoprotein, a carbohydrate, a microvesicle, a virus, a membrane fragment, a small molecule, a heavy metal, a toxin, a drug, a nucleic acid (including without limitation microRNA (miR) and messenger RNA (mRNA)), a protein-nucleic acid complex, and various combinations, fragments and/or complexes of any of these. The target can, e.g., comprise a mixture of microvesicles and non-microvesicle entities.

[0405] In an aspect, the invention also provides a method comprising contacting an oligonucleotide or plurality of oligonucleotides with a sample and detecting the presence or level of binding of the oligonucleotide or plurality of oligonucleotides to a target in the sample, wherein the oligonucleotide or plurality of oligonucleotides can be those provided by the invention above. The sample may comprise a biological sample, an organic sample, an inorganic sample, a tissue, a cell culture, a bodily fluid, blood, serum, a cell, a microvesicle, a protein complex, a lipid complex, a carbohydrate, or any combination, fraction or variation thereof. The target may comprise a cell, an organelle, a protein complex, a lipoprotein, a carbohydrate, a microvesicle, a membrane fragment, a small molecule, a heavy metal, a toxin, or a drug.

[0406] In a related aspect, the invention provides a method comprising: a) contacting a biological sample comprising microvesicles with an oligonucleotide probe library, wherein optionally the oligonucleotide probe library comprises an oligonucleotide or plurality of oligonucleotides those provided by the invention above; b) identifying oligonucleotides bound to at least a portion of the microvesicles; and c) characterizing the sample based on a profile of the identified oligonucleotides.

[0407] In another aspect, the invention provides a method comprising: a) contacting a sample with an oligonucleotide probe library comprising at least 10⁶, 10⁷, 10⁸, 10⁹, 10¹⁰, 10¹¹, 10¹², 10¹³, 10¹⁴, 10¹⁵, 10¹⁶, 10¹⁷, or at least 10¹⁸ different oligonucleotide sequences oligonucleotides to form a mixture in solution, wherein the oligonucleotides are capable of binding a plurality of entities in the sample to form complexes, wherein optionally the oligonucleotide probe library comprises an oligonucleotide or plurality of oligonucleotides as provided by the invention above; b) partitioning the complexes formed in step (a) from the mixture; and c) detecting oligonucleotides present in the complexes partitioned in step (b) to identify an oligonucleotide profile for the sample. In an embodiment, the detecting step comprises performing sequencing of all or some of the oligonucleotides in the complexes, amplification of all or some of the oligonucleotides in the complexes, and/or hybridization of all or some of the oligonucleotides in the complexes to an array. The array can be any useful array, such as a planar or particle-based array.

[0408] In still another aspect, the invention provides a method for generating an enriched oligonucleotide probe library comprising: a) contacting a first oligonucleotide library with a biological test sample and a biological control sample, wherein complexes are formed between biological entities present in the biological samples and a plurality of oligonucleotides present in the first oligonucleotide library; b) partitioning the complexes formed in step (a) and isolating the oligonucleotides in the complexes to produce a subset of oligonucleotides for each of the biological test sample and biological control sample; c) contacting the subsets of oligonucleotides in (b) with the biological test sample and biological control sample wherein complexes are formed between biological entities present in the biological samples and a second plurality of oligonucleotides present in the subsets of oligonucleotides to generate a second subset group of oligonucleotides; and d) optionally repeating steps b)-c), one, two, three or more times to produce a respective third, fourth, fifth or more subset group of oligonucleotides, thereby producing the enriched oligonucleotide probe library. In a related aspect, the invention provides a plurality of oligonucleotides comprising at least 2, 3, 4, 5, 6, 7, 8, 9, 10, 11, 12, 13, 14, 15, 16, 17, 18, 19, 20, 25, 30, 40, 45, 50, 55, 60, 65, 70, 75, 80, 85, 90, 95, 100, 125, 150, 175, 200, 300, 400, 500, 600, 700, 800, 900, 1000, 2000, 3000, 4000, 5000, 6000, 7000, 8000, 9000, 10000, 20000, 30000, 40000, 50000, 60000, 70000, 80000, 90000, 100000, 200000, 300000, 400000, or 500000 different oligonucleotide sequences, wherein the plurality results from the method in this paragraph, wherein the library is capable of distinguishing a first phenotype from a second phenotype. In some embodiments, the first phenotype comprises a disease or disorder and the second phenotype comprises a healthy state; or wherein the first phenotype comprises a disease or disorder and the second phenotype comprises a different disease or disorder; or wherein the first phenotype comprises a stage or progression of a disease or disorder and the second phenotype comprises a different stage or progression of the same disease or disorder; or wherein the first phenotype comprises a positive response to a therapy and the second phenotype comprises a negative response to the same therapy.

[0409] In yet another aspect, the invention provides a method of characterizing a disease or disorder, comprising: a) contacting a biological test sample with the oligonucleotide or plurality of oligonucleotides provided by the invention; b) detecting a presence or level of complexes formed in step (a) between the oligonucleotide or plurality of oligonucleotides provided by the invention and a target in the biological test sample; and c) comparing the presence or level detected in step (b) to a reference level from a biological control sample, thereby characterizing the disease or disorder. The step of detecting may comprise performing sequencing of all or some of the oligonucleotides in the complexes, amplification of all or some of the oligonucleotides in the complexes, and/or hybridization of all or some of the oligonucleotides in the complexes to an array. The sequencing may be high-throughput or next generation sequencing.

[0410] In the methods of the invention, the biological test sample and biological control sample may each comprise a tissue sample, a cell culture, or a biological fluid. In some embodiments, the biological fluid comprises a bodily fluid. Useful bodily fluids within the method of the invention comprise peripheral blood, sera, plasma, ascites, urine, cerebrospinal fluid (CSF), sputum, saliva, bone marrow, synovial fluid, aqueous humor, amniotic fluid, cerumen, breast milk, broncheoalveolar lavage fluid, semen, prostatic fluid, cowper's fluid or pre-ejaculatory fluid, female ejaculate, sweat, fecal matter, hair, tears, cyst fluid, pleural and peritoneal fluid, pericardial fluid, lymph, chyme, chyle, bile, interstitial fluid, menses, pus, sebum, vomit, vaginal secretions, mucosal secretion, stool water, pancreatic juice, lavage fluids from sinus cavities, bronchopulmonary aspirates, blastocyl cavity fluid, or umbilical cord blood. In some preferred embodiments, the bodily fluid comprises blood, serum or plasma. The biological fluid may comprise microvesicles. In such case, the complexes may be formed between the oligonucleotide or plurality of oligonucleotides and at least one of the microvesicles.

[0411] The biological test sample and biological control sample may further comprise isolated microvesicles, wherein optionally the microvesicles are isolated using at least one of chromatography, filtration, ultrafiltration, centrifugation, ultracentrifugation, flow cytometry, affinity capture (e.g., to a planar surface, column or bead), polymer precipitation, and using microfluidics. The vesicles can also be isolated after contact with the oligonucleotide or plurality of oligonucleotides.

[0412] In various embodiments of the methods of the invention, the oligonucleotide or plurality of oligonucleotides binds a polypeptide or fragment thereof. The polypeptide or fragment thereof can be soluble or membrane bound, wherein optionally the membrane comprises a microvesicle membrane. The membrane could also be from a cell or a fragment of a cell of vesicle. In some embodiments, the polypeptide or fragment thereof comprises a biomarker in Table 3, Table 4 or any one of Tables 18-25. For example, the polypeptide or fragment thereof could be a general vesicle marker such as in Table 3 or a tissue-related or disease-related marker such as in Table 4, or a vesicle associated biomarker provided in any one of Tables 18-25. The oligonucleotide or plurality of oligonucleotides may bind a microvesicle surface antigen in the biological sample. For example, the oligonucleotide or plurality of oligonucleotides can be enriched from a naïve library against microvesicles.

[0413] As noted above, the microvesicles may be isolated in whole or in part using polymer precipitation. In an embodiment, the polymer comprises polyethylene glycol (PEG). Any appropriate form of PEG may be used. For example, the PEG may be PEG 8000. The PEG may be used at any appropriate concentration. For example, the PEG can be used at a concentration of 1%, 2%, 3%, 4%, 5%, 6%, 7%, 8%, 9%, 10%, 11%, 12%, 13%, 14% or 15% to isolate the microvesicles. In some embodiments, the PEG is used at a concentration of 6%.

[0414] The invention provides oligonucleotide probes that can be used to carry out the methods herein. See, e.g., Examples 26-32. In an aspect, the invention provides an oligonucleotide comprising a sequence according to any one of SEQ ID NOs 137-969 and 1072-4150. In a related aspect, the invention provides an oligonucleotide comprising a sequence according to any one of the SEQ ID NOs in Table 40. In another related aspect, the invention provides an oligonucleotide comprising a sequence according to any one of the SEQ ID NOs in the row “2000v1” in Table 43. In still another related aspect, the invention provides an oligonucleotide comprising a sequence according to any one of the SEQ ID NOs in the row “2000v2” in Table 43. In yet another related aspect, the invention provides an oligonucleotide comprising a sequence according to any one of the SEQ ID NOs in the row “Common” in Table 43.

[0415] The oligonucleotides of the invention can comprise flanking regions for various purposes, including without limitation amplification, capture, conjugation or spacing. For example, the invention provides an oligonucleotide comprising a sequence according to any one of the SEQ ID NOs above and further having a 5′ region with sequence 5′-CTAGCATGACTGCAGTACGT (SEQ ID NO. 131) and/or a 3′ region with sequence 5′-CTGTCTCTTATACACATCTGACGCTGCCGACGA (SEQ ID NO. 132).

[0416] The invention further provides oligonucleotides homologous to the SEQ ID NOs above. For example, the invention provides an oligonucleotide comprising a nucleic acid sequence or a portion thereof that is at least 50, 55, 60, 65, 70, 75, 80, 85, 90, 95, 96, 97, 98, 99 or 100 percent homologous to an oligonucleotide sequence of any one of the SEQ ID NOs above. The homologous sequences may comprise similar properties to the listed sequences, such as similar binding properties.

[0417] In an aspect, the invention provides a plurality of oligonucleotides comprising at least 1, 2, 3, 4, 5, 6, 7, 8, 9, 10, 11, 12, 13, 14, 15, 16, 17, 18, 19, 20, 25, 30, 40, 45, 50, 55, 60, 65, 70, 75, 80, 85, 90, 95, 100, 125, 150, 175, 200, 300, 400, 500, 600, 700, 800, 900, 1000, 2000, 3000, 4000, 5000, 6000, 7000, 8000, 9000, or at least 10000 different oligonucleotide sequences as described in the paragraphs above. For example, the invention provides a plurality of oligonucleotides comprising member sequences having at least 1, 2, 3, 4, 5, 6, 7, 8, 9, 10, 11, 12, 13, 14, 15, 16, 17, 18, 19, 20, 25, 30, 40, 45, 50, 55, 60, 65, 70, 75, 80, 85, 90, 95, 100, 125, 150, 175, 200, 300, 400, 500, 600, 700, 800, 900, 1000, 1500, 2000, 2500, 3000, 3500, 4000, or all variable regions according to SEQ ID NOs 137-969 and 1072-4150.

[0418] The plurality of oligonucleotides can comprise at least 1, 2, 3, 4, 5, 6, 7, 8, 9, 10, 11, 12, 13, 14, 15, 16, 17, 18, 19, 20, 25, 30, 40, 45, 50, 55, 60, 65, 70, 75, or all SEQ ID NOs listed in Table 40. In an embodiment, the plurality of oligonucleotides comprises at least the first 1, 2, 3, 4, 5, 6, 7, 8, 9, 10, 11, 12, 13, 14, 15, 16, 17, 18, 19, 20, 25, 30, 40, 45, 50, 55, 60, 65, 70, 75, or SEQ ID NOs listed in Table 40.

[0419] The plurality of oligonucleotides can also comprise at least 1, 2, 3, 4, 5, 6, 7, 8, 9, 10, 11, 12, 13, 14, 15, 16, 17, 18, 19, 20, 25, 30, 40, 45, 50, 55, 60, 65, 70, 75, 80, 85, 90, 95, 100, 125, 150, 175, 200, 225, 250, 275, 300, or all SEQ ID NOs listed in row “2000v1” of Table 43. In an embodiment, the plurality of oligonucleotides comprises at least the first 1, 2, 3, 4, 5, 6, 7, 8, 9, 10, 11, 12, 13, 14, 15, 16, 17, 18, 19, 20, 25, 30, 40, 45, 50, 55, 60, 65, 70, 75, 80, 85, 90, 95, 100, 125, 150, 175, 200, 225, 250, 275, 300, or all SEQ ID NOs listed in row “2000v1” of Table 43.

[0420] The plurality of oligonucleotides can comprise at least 1, 2, 3, 4, 5, 6, 7, 8, 9, 10, 11, 12, 13, 14, 15, 16, 17, 18, 19, 20, 25, 30, 40, 45, 50, 55, 60, 65, 70, 75, 80, 85, 90, 95, 100, 105, 110, 115, 120, 125, 130, 135, 140, 145 or all SEQ ID NOs listed in row “2000v2” of Table 43. In an embodiment, the plurality of oligonucleotides comprises at least the first 1, 2, 3, 4, 5, 6, 7, 8, 9, 10, 11, 12, 13, 14, 15, 16, 17, 18, 19, 20, 25, 30, 40, 45, 50, 55, 60, 65, 70, 75, 80, 85, 90, 95, 100, 105, 110, 115, 120, 125, 130, 135, 140, 145 or all SEQ ID NOs listed in row “2000v2” of Table 43.

[0421] The plurality of oligonucleotides can also comprise at least 1, 2, 3, 4, 5, 6, 7, 8, 9, 10, 11, 12, 13, 14, 15, 16, 17 or all variable regions listed in row “Common” of Table 43. In an embodiment, the plurality of oligonucleotides comprises at least the first 1, 2, 3, 4, 5, 6, 7, 8, 9, 10, 11, 12, 13, 14, 15, 16, 17 or all SEQ ID NOs listed in row “Common” of Table 43.

[0422] The oligonucleotide or at least one member of the plurality of oligonucleotides can have least one functional modification selected from the group consisting of DNA, RNA, biotinylation, a non-naturally occurring nucleotides, a deletion, an insertion, an addition, and a chemical modification. Such modifications may provide additional or altered functions to the oligonucleotides, including without limitation capture, detection, stability, or binding properties.

[0423] Such oligonucleotides and plurality of oligonucleotides (pools) can be used to characterize a phenotype as described herein. In an aspect, the invention provides a method of characterizing a phenotype in a sample comprising: (a) contacting the sample with at least one oligonucleotide or plurality of oligonucleotides provided by the invention (see above); and (b) identifying a presence or level of a complex formed between the at least one oligonucleotide or plurality of oligonucleotides and the sample, wherein the presence or level is used to characterize the phenotype. Any useful technique for identifying can be used according to the invention. In various embodiments, the identifying comprises sequencing, amplification, hybridization, gel electrophoresis or chromatography. In an embodiment, identifying by hybridization comprises contacting the sample with at least one labeled probe that is configured to hybridize with at least one oligonucleotide. The at least one labeled probe can be directly or indirectly attached to a label. Any useful label can be used, including without limitation a fluorescent or magnetic label. In another embodiment, identifying by sequencing comprises next generation sequencing, dye termination sequencing, and/or pyrosequencing.

[0424] In the methods of the invention, the complex formed between the at least one oligonucleotide or the plurality of oligonucleotides and the sample can be a complex formed between a microvesicle population in the sample and the at least one oligonucleotide or plurality of oligonucleotides. The microvesicle population can be isolated in whole or in part from other constituents in the sample before of after the contacting. In embodiments, the isolating uses affinity purification, filtration, polymer precipitation, PEG precipitation, ultracentrifugation, a molecular crowding reagent, affinity isolation, affinity selection, or any combination thereof.

[0425] In the methods of the invention, the phenotype can be any detectable phenotype. In some embodiments, the phenotype comprises a disease or disorder. In such cases, the characterizing can be a diagnosis, prognosis and/or theranosis for the disease or disorder. The theranosis can be any type of therapy-related such as described herein. The theranosis includes without limitation predicting a treatment efficacy or lack thereof, or monitoring a treatment efficacy.

[0426] The characterizing step of the methods of the invention may entail comparing the presence or level to a reference. Any useful reference can be used. In an embodiment wherein the phenotype comprises a disease or disorder, the reference can be the presence or level determined in a sample from an individual without a disease or disorder, or from an individual with a different state of the disease or disorder. In some embodiments, the comparison to the reference of at least one oligonucleotide comprising a sequence having a SEQ ID NO provided above indicates that the sample comprises a cancer sample or a non-cancer/normal sample.

[0427] The disease or disorder detected by the oligonucleotide, plurality of oligonucleotides, or methods provided here may comprise any appropriate disease or disorder of interest, including without limitation Breast Cancer, Alzheimer's disease, bronchial asthma, Transitional cell carcinoma of the bladder, Giant cellular osteoblastoclastoma, Brain Tumor, Colorectal adenocarcinoma, Chronic obstructive pulmonary disease (COPD), Squamous cell carcinoma of the cervix, acute myocardial infarction (AMI)/acute heart failure, Chron's Disease, diabetes mellitus type II, Esophageal carcinoma, Squamous cell carcinoma of the larynx, Acute and chronic leukemia of the bone marrow, Lung carcinoma, Malignant lymphoma, Multiple Sclerosis, Ovarian carcinoma, Parkinson disease, Prostate adenocarcinoma, psoriasis, Rheumatoid Arthritis, Renal cell carcinoma, Squamous cell carcinoma of skin, Adenocarcinoma of the stomach, carcinoma of the thyroid gland, Testicular cancer, ulcerative colitis, or Uterine adenocarcinoma.

[0428] In some embodiments, the disease or disorder comprises a cancer, a premalignant condition, an inflammatory disease, an immune disease, an autoimmune disease or disorder, a cardiovascular disease or disorder, neurological disease or disorder, infectious disease or pain. The cancer can include without limitation one of acute lymphoblastic leukemia; acute myeloid leukemia; adrenocortical carcinoma; AIDS-related cancers; AIDS-related lymphoma; anal cancer; appendix cancer; astrocytomas; atypical teratoid/rhabdoid tumor; basal cell carcinoma; bladder cancer; brain stem glioma; brain tumor (including brain stem glioma, central nervous system atypical teratoid/rhabdoid tumor, central nervous system embryonal tumors, astrocytomas, craniopharyngioma, ependymoblastoma, ependymoma, medulloblastoma, medulloepithelioma, pineal parenchymal tumors of intermediate differentiation, supratentorial primitive neuroectodermal tumors and pineoblastoma); breast cancer; bronchial tumors; Burkitt lymphoma; cancer of unknown primary site; carcinoid tumor; carcinoma of unknown primary site; central nervous system atypical teratoid/rhabdoid tumor; central nervous system embryonal tumors; cervical cancer; childhood cancers; chordoma; chronic lymphocytic leukemia; chronic myelogenous leukemia; chronic myeloproliferative disorders; colon cancer; colorectal cancer; craniopharyngioma; cutaneous T-cell lymphoma; endocrine pancreas islet cell tumors; endometrial cancer; ependymoblastoma; ependymoma; esophageal cancer; esthesioneuroblastoma; Ewing sarcoma; extracranial germ cell tumor; extragonadal germ cell tumor; extrahepatic bile duct cancer; gallbladder cancer; gastric (stomach) cancer; gastrointestinal carcinoid tumor; gastrointestinal stromal cell tumor; gastrointestinal stromal tumor (GIST); gestational trophoblastic tumor; glioma; hairy cell leukemia; head and neck cancer; heart cancer; Hodgkin lymphoma; hypopharyngeal cancer; intraocular melanoma; islet cell tumors; Kaposi sarcoma; kidney cancer; Langerhans cell histiocytosis; laryngeal cancer; lip cancer; liver cancer; lung cancer; malignant fibrous histiocytoma bone cancer; medulloblastoma; medulloepithelioma; melanoma; Merkel cell carcinoma; Merkel cell skin carcinoma; mesothelioma; metastatic squamous neck cancer with occult primary; mouth cancer; multiple endocrine neoplasia syndromes; multiple myeloma; multiple myeloma/plasma cell neoplasm; mycosis fungoides; myelodysplastic syndromes; myeloproliferative neoplasms; nasal cavity cancer; nasopharyngeal cancer; neuroblastoma; Non-Hodgkin lymphoma; nonmelanoma skin cancer; non-small cell lung cancer; oral cancer; oral cavity cancer; oropharyngeal cancer; osteosarcoma; other brain and spinal cord tumors; ovarian cancer; ovarian epithelial cancer; ovarian germ cell tumor; ovarian low malignant potential tumor; pancreatic cancer; papillomatosis; paranasal sinus cancer; parathyroid cancer; pelvic cancer; penile cancer; pharyngeal cancer; pineal parenchymal tumors of intermediate differentiation; pineoblastoma; pituitary tumor; plasma cell neoplasm/multiple myeloma; pleuropulmonary blastoma; primary central nervous system (CNS) lymphoma; primary hepatocellular liver cancer; prostate cancer; rectal cancer; renal cancer; renal cell (kidney) cancer; renal cell cancer; respiratory tract cancer; retinoblastoma; rhabdomyosarcoma; salivary gland cancer; Sézary syndrome; small cell lung cancer; small intestine cancer; soft tissue sarcoma; squamous cell carcinoma; squamous neck cancer; stomach (gastric) cancer; supratentorial primitive neuroectodermal tumors; T-cell lymphoma; testicular cancer; throat cancer; thymic carcinoma; thymoma; thyroid cancer; transitional cell cancer; transitional cell cancer of the renal pelvis and ureter; trophoblastic tumor; ureter cancer; urethral cancer; uterine cancer; uterine sarcoma; vaginal cancer; vulvar cancer; Waldenström macroglobulinemia; or Wilm's tumor. The premalignant condition can include without limitation Barrett's Esophagus. The autoimmune disease can include without limitation one of inflammatory bowel disease (IBD), Crohn's disease (CD), ulcerative colitis (UC), pelvic inflammation, vasculitis, psoriasis, diabetes, autoimmune hepatitis, multiple sclerosis, myasthenia gravis, Type I diabetes, rheumatoid arthritis, psoriasis, systemic lupus erythematosis (SLE), Hashimoto's Thyroiditis, Grave's disease, Ankylosing Spondylitis Sjogrens Disease, CREST syndrome, Scleroderma, Rheumatic Disease, organ rejection, Primary Sclerosing Cholangitis, or sepsis. The cardiovascular disease can include without limitation one of atherosclerosis, congestive heart failure, vulnerable plaque, stroke, ischemia, high blood pressure, stenosis, vessel occlusion or a thrombotic event. The neurological disease can include without limitation one of Multiple Sclerosis (MS), Parkinson's Disease (PD), Alzheimer's Disease (AD), schizophrenia, bipolar disorder, depression, autism, Prion Disease, Pick's disease, dementia, Huntington disease (HD), Down's syndrome, cerebrovascular disease, Rasmussen's encephalitis, viral meningitis, neurospsychiatric systemic lupus erythematosus (NPSLE), amyotrophic lateral sclerosis, Creutzfeldt-Jacob disease, Gerstmann-Straussler-Scheinker disease, transmissible spongiform encephalopathy, ischemic reperfusion damage (e.g. stroke), brain trauma, microbial infection, or chronic fatigue syndrome. The pain can include without limitation one of fibromyalgia, chronic neuropathic pain, or peripheral neuropathic pain. The infectious disease can include without limitation one of a bacterial infection, viral infection, yeast infection, Whipple's Disease, Prion Disease, cirrhosis, methicillin-resistant Staphylococcus aureus, HIV, HCV, hepatitis, syphilis, meningitis, malaria, tuberculosis, or influenza. One of skill will appreciate that the oligonucleotide or plurality of oligonucleotides or methods of the invention can be used to assess any number of these or other related diseases and disorders.

[0429] In some embodiments of the invention, the oligonucleotide or plurality of oligonucleotides and methods of use thereof are useful for characterizing certain diseases or disease states. As desired, a pool of oligonucleotides useful for characterizing various diseases is assembled to create a master pool that can be used to probe useful for characterizing the various diseases. One of skill will also appreciate that pools of oligonucleotides useful for characterizing specific diseases or disorders can be created as well. The sequences provided herein can also be modified as desired so long as the functional aspects are still maintained (e.g., binding to various targets or ability to characterize a phenotype). For example, the oligonucleotides may comprise DNA or RNA, incorporate various non-natural nucleotides, incorporate other chemical modifications, or comprise various deletions or insertions. Such modifications may facilitate synthesis, stability, delivery, labeling, etc, or may have little to no effect in practice. In some cases, some nucleotides in an oligonucleotide may be substituted while maintaining functional aspects of the oligonucleotide. Similarly, 5′ and 3′ flanking regions may be substituted. In still other cases, only a portion of an oligonucleotide may be determined to direct its functionality such that other portions can be deleted or substituted. Numerous techniques to synthesize and modify nucleotides and polynucleotides are disclosed herein or are known in the art.

[0430] In an aspect, the invention provides a kit comprising a reagent for carrying out the methods of the invention provided herein. In a similar aspect, the invention contemplates use of a reagent for carrying out the methods of the invention provided herein. In embodiments, the reagent comprises an oligonucleotide or plurality of oligonucleotides. The oligonucleotide or plurality of oligonucleotides can be those provided herein. The reagent may comprise various other useful components including without limitation microRNA (miR) and messenger RNA (mRNA)), a protein-nucleic acid complex, and various combinations, fragments and/or complexes of any of these. The one or more of: a) a reagent configured to isolate a microvesicle, optionally wherein the at least one reagent configured to isolate a microvesicle comprises a binding agent to a microvesicle antigen, a column, a substrate, a filtration unit, a polymer, polyethylene glycol, PEG4000, PEG8000, a particle or a bead; b) at least one oligonucleotide configured to act as a primer or probe in order to amplify, sequence, hybridize or detect the oligonucleotide or plurality of oligonucleotides; and c) a reagent configured to remove one or more abundant protein from a sample, wherein optionally the one or more abundant protein comprises at least one of albumin, immunoglobulin, fibrinogen and fibrin.

### Recovery of Oligonucleotide Probes Post-Probing

[0431] As described herein, the oligonucleotide probes of the invention can be used to probe a sample in order to characterize a phenotype. The methods may entail recovering the oligonucleotide probes that bound various biological entities in the sample in order to identify the bound probes. In an aspect, the invention provides a method of detecting at least one oligonucleotide in a sample, comprising: (a) providing the at least one oligonucleotide comprising a capture moiety; (b) contacting the sample with the at least one oligonucleotide provided in (a); (c) capturing the at least one oligonucleotide that formed a complex with a component in the sample in (b); and (d) identifying a presence or level of the at least one oligonucleotide captured in (c), wherein optionally the presence or level is used to characterize a phenotype. See, e.g., Example 33 and FIGS. 17A-E. The at least one oligonucleotide may be captured to a substrate, including without limitation a bead or planar substrate. The capture moiety can be any useful capture moiety, including without limitation a biotin moiety. The capture moiety can be cleavable, e.g., photocleavable or chemically cleavable. In an embodiment, the at least one oligonucleotide is captured to a substrate coupled to avidin or streptavidin. Such configuration is particularly useful when the capture moiety comprises a biotin moiety. In some embodiments, the captured at least one oligonucleotide is released from the substrate by irradiation prior to the identifying. Any useful irradiation, e.g., ultra violet (UV) light may be used. Any useful technique for identifying can be used according to the invention. In various embodiments, the identifying comprises sequencing, amplification, hybridization, gel electrophoresis or chromatography. In an embodiment, identifying by hybridization comprises contacting the sample with at least one labeled probe that is configured to hybridize with at least one oligonucleotide. The at least one labeled probe can be directly or indirectly attached to a label. Any useful label can be used, including without limitation a fluorescent or magnetic label. In another embodiment, identifying by sequencing comprises next generation sequencing, dye termination sequencing, and/or pyrosequencing. The at least one oligonucleotide can be an oligonucleotide or plurality of oligonucleotides provided by the invention. See e.g., the oligonucleotides and plurality of oligonucleotides described above.

Single Strand DNA (ssDNA) Library Preparation

[0432] In an embodiment, the invention provides a nucleic acid molecule comprising a 5′ leader region which is 5′ of a variable region, which is 5′ of a tail region, wherein the leader region comprises a lengthener region, a terminator region and a forward primer region, and the tail region comprises a reverse primer region. The nucleic acid molecule may be used for asymmetric or unequal length PCR applications as desired, e.g., to recover ssDNA. See, e.g., Example 34 and FIGS. 18A-C. The lengthener region can be any desired length. In some embodiments, the lengthener region comprises at least 10, 11, 12, 13, 14, 15, 16, 17, 18, 19, 20, 21, 22, 23, 24, 25, 26, 27, 28, 29, 30, 31, 32, 33, 34, 35, 36, 37, 38, 39, 30, 41, 42, 43, 44, 45, 46, 47, 48, 49, or 50 nucleotides. The lengthener region may comprise a poly-A sequence. Similarly, the terminator region can be any desired length. In some embodiments, the terminator region comprises at least 3, 4, 5, 6, 7, 8, 9, 10, 11, 12, 13, 14, 15, 16, 17, 18, 19, 20, 21, 22, 23, 24, 25, 26, 27, 28, 29, 30, 31, 32, 33, 34, 35, 36, 37, 38, 39, 30, 41, 42, 43, 44, 45, 46, 47, 48, 49, or 50 nucleotides. The terminator region may comprise a non-nucleotide terminator. For example, the non-nucleotide terminator can be a polymer such as triethylene glycol or the like. The forward primer region can be any desired length. In some embodiments, the forward primer region comprises at least 10, 11, 12, 13, 14, 15, 16, 17, 18, 19, 20, 21, 22, 23, 24, 25, 26, 27, 28, 29, 30, 31, 32, 33, 34, 35, 36, 37, 38, 39, 30, 41, 42, 43, 44, 45, 46, 47, 48, 49, or 50 nucleotides. The variable region can be any desired length. In some embodiments, the variable region comprises at least 10, 11, 12, 13, 14, 15, 16, 17, 18, 19, 20, 21, 22, 23, 24, 25, 26, 27, 28, 29, 30, 31, 32, 33, 34, 35, 36, 37, 38, 39, 30, 41, 42, 43, 44, 45, 46, 47, 48, 49, or 50 nucleotides. In some embodiments, the variable region binds a target molecule or complex through non-Watson-Crick base pairing. For example, the variable region may act as an aptamer and bind proteins or other entities. Finally, the reverse primer region can be any desired length. In some embodiments, the reverse primer region comprises at least 10, 11, 12, 13, 14, 15, 16, 17, 18, 19, 20, 21, 22, 23, 24, 25, 26, 27, 28, 29, 30, 31, 32, 33, 34, 35, 36, 37, 38, 39, 30, 41, 42, 43, 44, 45, 46, 47, 48, 49, or 50 nucleotides.

[0433] In a related aspect, the invention provides a method of generating a single-stranded DNA (ssDNA) molecule comprising: a) providing a mixture comprising a nucleic acid molecule as described in the paragraph above, and forward and reverse primers configured to amplify the nucleic acid molecule from the forward primer region and reverse primer region, respectively; and b) performing asymmetric polymerase chain reaction (PCR) on the mixture in a) to favorably amplify the reverse strand of the nucleic acid molecule, wherein the forward and reverse primers in the mixture are at a ratio of at least about 1:5 (F/R) in favor of the reverse primers; thereby generating the ssDNA molecule. In an embodiment, the ratio is between about 1:20-1:50 (F/R) in favor of the reverse primers. For example, the ratio can be between about 1:37.5 (F/R) in favor of the reverse primers. The method may further comprise isolating the amplified reverse strand of the nucleic acid molecule on a native gel. The method may also further comprise: c) denaturing the amplified nucleic acid molecules from b); and d) isolating the denatured reverse strand of the nucleic acid molecules from c). In an embodiment, the denatured reverse strand of the nucleic acid molecules is isolated on a denaturing gel. The mixture in a) can comprise additional components as desired. For example, the mixture may further comprise at least one of an enrichment buffer, non-target molecules, proteins, microvesicles, and polyethyleve glycol.

[0434] In a related aspect, the invention provides a kit comprising a reagent for carrying out the methods herein. In still another related aspect, the invention provides for use of a reagent for carrying out the methods. In various embodiments, the reagent comprises at least one of a buffer, a nucleic acid molecule described above, and forward and/or reverse primers configured to amplify the nucleic acid molecule.

Detecting Watson-Crick Base Pairing with an Oligonucleotide Probe

[0435] The oligonucleotide probes provided by the invention can bind via non-Watson Crick base pairing. However, in some cases, the oligonucleotide probes provided by the invention can bind via Watson Crick base pairing. The oligonucleotide probe libraries of the invention, e.g., as described above, can query both types of binding events simultaneously. For example, some oligonucleotide probes may bind the microvesicle protein antigens in the classical aptamer sense, whereas other oligonucleotide probes may bind microvesicles via nucleic acids associated with the microvesicles, e.g., nucleic acid (including without limitation microRNA and mRNA) on the surface of the microvesicles or as payload. Such surface bound nucleic acids can be associated with proteins. For example, they may comprise Argonaute-microRNA complexes. The argonaute protein can be Ago1, Ago2, Ago3 and/or Ago4.

[0436] In addition to the oligonucleotide probe library approach described herein which relies on determining a sequence of the oligonucleotides (e.g., via sequencing, hybridization or amplification), assays can also be designed to detect Watson Crick base pairing. In some embodiments, these approaches rely on Ago2-mediated cleavage wherein an Ago2-microRNA complex can be used to detected using oligonucleotide probes. These approaches can use oligonucleotide probes to detect Ago2-microRNA complexes, which may or may not be associated with microvesicles. The detection can be used to characterize a phenotype as described herein. Such detection can be used along side the sequencing identification methods described herein (e.g., via sequencing, hybridization or amplification). For further details, see PCT/US15/62184, filed Nov. 23, 2015, which application is incorporated by reference herein in its entirety.

### Therapeutics

[0437] As used herein “therapeutically effective amount” refers to an amount of a composition that relieves (to some extent, as judged by a skilled medical practitioner) one or more symptoms of the disease or condition in a mammal. Additionally, by “therapeutically effective amount” of a composition is meant an amount that returns to normal, either partially or completely, physiological or biochemical parameters associated with or causative of a disease or condition. A clinician skilled in the art can determine the therapeutically effective amount of a composition in order to treat or prevent a particular disease condition, or disorder when it is administered, such as intravenously, subcutaneously, intraperitoneally, orally, or through inhalation. The precise amount of the composition required to be therapeutically effective will depend upon numerous factors, e.g., such as the specific activity of the active agent, the delivery device employed, physical characteristics of the agent, purpose for the administration, in addition to many patient specific considerations. But a determination of a therapeutically effective amount is within the skill of an ordinarily skilled clinician upon the appreciation of the disclosure set forth herein.

[0438] The terms “treating,” “treatment,” “therapy,” and “therapeutic treatment” as used herein refer to curative therapy, prophylactic therapy, or preventative therapy. An example of “preventative therapy” is the prevention or lessening the chance of a targeted disease (e.g., cancer or other proliferative disease) or related condition thereto. Those in need of treatment include those already with the disease or condition as well as those prone to have the disease or condition to be prevented. The terms “treating,” “treatment,” “therapy,” and “therapeutic treatment” as used herein also describe the management and care of a mammal for the purpose of combating a disease, or related condition, and includes the administration of a composition to alleviate the symptoms, side effects, or other complications of the disease, condition. Therapeutic treatment for cancer includes, but is not limited to, surgery, chemotherapy, radiation therapy, gene therapy, and immunotherapy.

[0439] As used herein, the term “agent” or “drug” or “therapeutic agent” refers to a chemical compound, a mixture of chemical compounds, a biological macromolecule, or an extract made from biological materials such as bacteria, plants, fungi, or animal (particularly mammalian) cells or tissues that are suspected of having therapeutic properties. The agent or drug can be purified, substantially purified or partially purified. An “agent” according to the present invention, also includes a radiation therapy agent or a “chemotherapeutic agent.”

[0440] As used herein, the term “diagnostic agent” refers to any chemical used in the imaging of diseased tissue, such as, e.g., a tumor.

[0441] As used herein, the term “chemotherapeutic agent” refers to an agent with activity against cancer, neoplastic, and/or proliferative diseases, or that has ability to kill cancerous cells directly.

[0442] As used herein, “pharmaceutical formulations” include formulations for human and veterinary use with no significant adverse toxicological effect. “Pharmaceutically acceptable formulation” as used herein refers to a composition or formulation that allows for the effective distribution of the nucleic acid molecules of the instant invention in the physical location most suitable for their desired activity.

[0443] As used herein the term “pharmaceutically acceptable carrier” is intended to include any and all solvents, dispersion media, coatings, antibacterial and antifungal agents, isotonic and absorption delaying agents, and the like, compatible with pharmaceutical administration. The use of such media and agents for pharmaceutically active substances is well known in the art. Except insofar as any conventional media or agent is incompatible with the active compound, use thereof in the compositions is contemplated.

### Aptamer-Toxin Conjugates as a Cancer Therapeutic

[0444] Previous work has developed the concept of antibody-toxin conjugates (“immunoconjugates”) as potential therapies for a range of indications, mostly directed at the treatment of cancer with a primary focus on hematological tumors. A variety of different payloads for targeted delivery have been tested in pre-clinical and clinical studies, including protein toxins, high potency small molecule cytotoxics, radioisotopes, and liposome-encapsulated drugs. While these efforts have successfully yielded three FDA-approved therapies for hematological tumors, immunoconjugates as a class (especially for solid tumors) have historically yielded disappointing results that have been attributable to multiple different properties of antibodies, including tendencies to develop neutralizing antibody responses to non-humanized antibodies, limited penetration in solid tumors, loss of target binding affinity as a result of toxin conjugation, and imbalances between antibody half-life and toxin conjugate half-life that limit the overall therapeutic index (reviewed by Reff and Heard, Critical Reviews in Oncology/Hematology, 40 (2001):25-35).

[0445] Aptamers are functionally similar to antibodies, except their absorption, distribution, metabolism, and excretion (“ADME”) properties are intrinsically different and they generally lack many of the immune effector functions generally associated with antibodies (e.g., antibody-dependent cellular cytotoxicity, complement-dependent cytotoxicity). In comparing many of the properties of aptamers and antibodies previously described, several factors suggest that toxin-delivery via aptamers offers several concrete advantages over delivery with antibodies, ultimately affording them better potential as therapeutics. Several examples of the advantages of toxin-delivery via aptamers over antibodies are as follows:
[0446] 1) Aptamer-toxin conjugates are entirely chemically synthesized. Chemical synthesis provides more control over the nature of the conjugate. For example, the stoichiometry (ratio of toxins per aptamer) and site of attachment can be precisely defined. Different linker chemistries can be readily tested. The reversibility of aptamer folding means that loss of activity during conjugation is unlikely and provides more flexibility in adjusting conjugation conditions to maximize yields.
[0447] 2) Smaller size allows better tumor penetration. Poor penetration of antibodies into solid tumors is often cited as a factor limiting the efficacy of conjugate approaches. See Colcher, D., Goel, A., Pavlinkova, G., Beresford, G., Booth, B., Batra, S. K. (1999) “Effects of genetic engineering on the pharmacokinetics of antibodies,” Q. J. Nucl. Med., 43: 132-139. Studies comparing the properties of unPEGylated anti-tenascin C aptamers with corresponding antibodies demonstrate efficient uptake into tumors (as defined by the tumor:blood ratio) and evidence that aptamer localized to the tumor is unexpectedly long-lived (t_{1/2}>12 hours) (Hicke, B. J., Stephens, A. W., “Escort aptamers: a delivery service for diagnosis and therapy”, J. Clin. Invest., 106:923-928 (2000)).
[0448] 3) Tunable PK. Aptamer half-life/metabolism can be easily tuned to match properties of payload, optimizing the ability to deliver toxin to the tumor while minimizing systemic exposure. Appropriate modifications to the aptamer backbone and addition of high molecular weight PEGs should make it possible to match the half-life of the aptamer to the intrinsic half-life of the conjugated toxin/linker, minimizing systemic exposure to non-functional toxin-bearing metabolites (expected if t_{1/2}(aptamer)<<t_{1/2}(toxin)) and reducing the likelihood that persisting unconjugated aptamer will functionally block uptake of conjugated aptamer (expected if t_{1/2}(aptamer)>>t_{1/2}(toxin)).
[0449] 4) Relatively low material requirements. It is likely that dosing levels will be limited by toxicity intrinsic to the cytotoxic payload. As such, a single course of treatment will likely entail relatively small (<100 mg) quantities of aptamer, reducing the likelihood that the cost of oligonucleotide synthesis will be a barrier for aptamer-based therapies.
[0450] 5) Parenteral administration is preferred for this indication. There will be no special need to develop alternative formulations to drive patient/physician acceptance.

[0451] The invention provides a pharmaceutical composition comprising a therapeutically effective amount of an aptamer provided by the invention or a salt thereof, and a pharmaceutically acceptable carrier or diluent. The invention also provides a pharmaceutical composition comprising a therapeutically effective amount of the aptamer or a salt thereof, and a pharmaceutically acceptable carrier or diluent. Relatedly, the invention provides a method of treating or ameliorating a disease or disorder, comprising administering the pharmaceutical composition to a subject in need thereof. Administering a therapeutically effective amount of the composition to the subject may result in: (a) an enhancement of the delivery of the active agent to a disease site relative to delivery of the active agent alone; or (b) an enhancement of microvesicles clearance resulting in a decrease of at least 10%, 20%, 30%, 40%, 50%, 60%, 70%, 80%, or 90% in a blood level of microvesicles targeted by the aptamer; or (c) an decrease in biological activity of microvesicles targeted by the aptamer of at least 10%, 20%, 30%, 40%, 50%, 60%, 70%, 80%, or 90%. In an embodiment, the biological activity of microvesicles comprises immune suppression or transfer of genetic information. The disease or disorder can include without limitation those disclosed herein. For example, the disease or disorder may comprise a neoplastic, proliferative, or inflammatory, metabolic, cardiovascular, or neurological disease or disorder. See, e.g., section “Phenotypes.”

### Anti-Target and Multivalent Oligonucleotides

[0452] As noted above, the target of oligonucleotide probes can be identified. For example, when the target comprises a protein or protein complex (e.g., a nucleoprotein or lipoprotein), identifying the target may comprise use of mass spectrometry (MS), peptide mass fingerprinting (PMF; protein fingerprinting), sequencing, N-terminal amino acid analysis, C-terminal amino acid analysis, Edman degradation, chromatography, electrophoresis, two-dimensional gel electrophoresis (2D gel), antibody array, or immunoassay. Such approaches can be applied to identify a number of targets recognized by an oligonucleotide probe library. For example, an oligonucleotide probe library can be incubated with a sample of interest, bound members of the library captured, and the targets bound to the captured members identified. See Example 23 herein for an example of such target identification using mass spectrometry.

[0453] The oligonucleotide aptamers to the various targets can be used for multiple purposes. In some embodiments, the aptamers are used as therapeutic agents. Immunotherapeutic approaches using antibodies that recognize foreign/misfolded antigens (e.g., anti-CD20, anti-CD30, anti-CD33, anti-CD52, anti-EGFR, anti-nucleolin, anti-nucleophosmin, etc.) can selectively kill target cells via linked therapeutic agents or by stimulating the immune system through activation of cell-mediated cytotoxicity. Aptamers or oligonucleotides are an attractive immunotherapeutic alternative for various reasons such as low cost, small size, ease and speed of synthesis, stability and low immunogenicity. In an embodiment, immunotherapeutic agents are conjugated to disease specific target oligonucleotide or antibody (Ab) for targeted cell killing via recruitment of complement proteins and the downstream membrane attack complex. See, e.g., Zhou and Rossi, Cell-type-specific, Aptamer-functionalized Agents for Targeted Disease Therapy, Mol Ther Nucleic Acids. 2014 Jun. 17; 3:e169. doi: 10.1038/mtna.2014.21; Pei et al., Clinical applications of nucleic acid aptamers in cancer, Mol Clin Oncol. 2014 May; 2(3):341-348. Epub 2014 Feb. 10. This approach can be applied to target diseased host cells such as cancer cells, gram negative bacteria, viral and/or parasitic infections, and the like.

[0454] In some embodiments, the invention provides a multipartite construct comprising a binding agent specific to a biological target with another binding agent specific to immunomodulatory entity. Examples of such constructs are shown in FIG. 23A. In Design 1 in the figure, the horizontal line indicates an oligonucleotide construct, which construct comprises a 5′ primer 2301 (Primer 1), a variable region 2302 that can be an aptamer to a target of interest, a 3′ primer 2303 (Primer 2), and an immunomodulatory domain region (“IMD”) 2304. The complete Design 1 construct can be used to bring a target of interest in proximity with an immunomodulatory agent. The primers can be designed for any desired purpose, e.g., amplification, capture, modification, direct or indirect labeling, and the like. In some embodiments, the target of the variable region is a disease marker and thus the construct is targeted to a disease cell or microvesicle. The immunomodulatory domain region can act as an immune stimulator or suppressor. Any appropriate immune stimulator or suppressor can be used, e.g., a small molecule, antibody or an aptamer. Thus, the construct can modulate the immune response at a target of interest, e.g., at a cell or microvesicle carrying the target. The basic construct can be modified as desired. For example, Design 2 in FIG. 23A shows the construct carrying a linker 2305 between Primer 2 2303 and the IMD 2304. Such linkers are explained further below and can be inserted between any components of the construct as desired. Linkers can provide a desired space between the regions of the construct and can be manipulated to influence other properties such as stability. Design 3 in FIG. 23A shows another example wherein the IMD 2304 is an oligonucleotide and the variable region 2302 and IMD 2304 lie between the primers 2301 and 2303. One of skill will appreciate that one or more linker, such as 2305 of Design 2, can also be inserted into Design 3, e.g., between the variable region 2302 and IMD 2304. One of skill will further appreciate that the ordering of the oligonucleotide segments from 5′ to 3′ can be modified, e.g., reversed. As a concrete example which will be described further below, FIG. 23B illustrates Design 1 and Design 2 from FIG. 23A wherein the variable region comprises an anti-CD20 oligonucleotide 2311 and the IMD comprises an anti-C1q oligonucleotide 2312, e.g., an oligonucleotide provided herein. See, e.g., Example 35. This constructs of FIG. 23B can be used used to target a CD20+ cell population and stimulate C1q mediated cell killing.

[0455] As noted, the multipartite constructs may be synthesized and/or modified as desired. In some embodiments of the invention, the multipartite oligonucleotide construct is synthesized directly with or without a linker in between the oligonucleotide segments. See, e.g., FIG. 23A Design 3, which can be generated directly via amplification by Primer 1 2301 and Primer 2 2303. One or more linker can act as a spacer to create a desired spacing between the target of the variable region segment 2302 and the target of the IMD segment 2304. The spacing can be determined via computer modeling or via experimentation due to steric hindrance or other considerations. Following the example of FIG. 23B, the type and size of the linker may be dependent upon steric hindrance between the CD20 target protein and the C1q protein/MAC complex.

[0456] The multipartite constructs can be generated against any appropriate target. The targets can include without limitation diseased cells, cancer cells, circulating tumor cells (CTCs), immune cells (e.g., B-cells, T-cells, macrophages, dendritic cells), microvesicles, bacteria, viruses or other parasites. The target can be large biological complexes, e.g., protein complexes, ribonucleoprotein complexes, lipid complexes, or a combination thereof. It will be understood that the specific target of the multipartite constructs can be a certain member of the foregoing macromolecular targets. For example, consider that the desired target of the multipartite construct is a cell or microvesicle. In such case, the multipartite construct can be directed to a specific biomarker, e.g., a surface antigen, of the cell or microvesicle. As a non-limiting example, the target of interest can be B-cells and the specific target of the variable region of the multipartite construct can be CD20. CD20 is a cellular marker of B-cells targeted by the monoclonal antibodies (mAb) rituximab, obinutuzumab, ofatumumab, ibritumomab tiuxetan, and tositumomab, which are used as agents in the treatment of B-cell lymphomas and leukemias. As another non-limiting example, the target of interest can be cancer cells and the specific target of the variable region of the multipartite construct can be c-MET. MET is a membrane receptor that is essential for embryonic development and wound healing. Abnormal MET activation in cancer correlates with poor prognosis, where aberrantly active MET triggers tumor growth, formation of new blood vessels (angiogenesis), and cancer spread to other organs (metastasis). MET has been observed to be deregulated in many types of human malignancies, including cancers of kidney, liver, stomach, breast, and brain. See FIG. 23D for illustration (discussed further below). Other biomarkers can be used as the specific target as desired. For example, the biomarker can be selected from Table 3, Table 4, Tables 18-26, or Table 45 herein. See FIG. 23C, which illustrates a construct of the invention 2331 having a segment that recognizes a biomarker 2332 (“Marker of Interest”) on a cell or vesicle surface 2333 (“Membrane”), and another segment 2334 that attracts an immune response (“Complement”). The construct 2331 can be such as in FIGS. 23A-B or any other desired configuration. Binding of such a construct to a target can cause a complement cascade and induce apoptosis.

[0457] In some embodiments of the invention, the target biomarker is selected from the group consisting of CD19, CD20, CD21, CD22 (also known as LL2), CDIM, and Lym-1. The target biomarker can be a membrane associated protein. In embodiments, the membrane associated protein is selected from the group consisting of CD4, CD19, DC-SIGN/CD209, HIV envelope glycoprotein gp120, CCR5, EGFR/ErbB1, EGFR2/ErbB2/HER2, EGFR3/ErbB3, EGFR4/ErbB4, EGFRvIII, Transferrin Receptor, PSMA, VEGF, VEGF-2, CD25, CD11a, CD33, CD20, CD3, CD52, CEA, TAG-72, LDL receptor, insulin receptor, megalin receptor, LRP, mannose receptor, P63/CKAP4 receptor, arrestin, ASGP, CCK-B, HGFR, RON receptor, FGFR, ILR, AFP, CA125/MUC16, PDGFR, stem cell factor receptor, colony stimulating factor-1 receptor, integrins, TLR, BCR and BAFF-R. The target biomarker can also be a cellular receptor selected from the group consisting of: nucleolin, human epidermal growth factor receptor 2 (HER2), CD20, a transferrin receptor, an asialoglycoprotein receptor, a thyroid-stimulating hormone (TSH) receptor, a fibroblast growth factor (FGF) receptor, CD3, the interleukin 2 (IL-2) receptor, a growth hormone receptor, an insulin receptor, an acetylcholine receptor, an adrenergic receptor, a vascular endothelial growth factor (VEGF) receptor, a protein channel, cadherin, a desmosome, and a viral receptor. In various embodiments, the target biomarker is a cell surface molecule selected from the group consisting of IgM, IgD, IgG, IgA, IgE, CD19, CD20, CD21, CD22, CD24, CD40, CD72, CD79a, CD79b, CD1d, CD5, CD9, CD10, CD1d, CD23, CD27, CD38, CD48, CD80, CD86, CD138, CD148, and combinations thereof. The target biomarker can be a lymphocyte-directing target such as one or more T-cell receptor motifs, T-cell a chains, T-cell $ chains, T-cell y chains, T-cell A chains, CCR7, CD3, CD4, CD5, CD7, CD8, CD11b, CD11c, CD16, CD19, CD20, CD21, CD22, CD25, CD28, CD34, CD35, CD40, CD45RA, CD45RO, CD52, CD56, CD62L, CD68, CD80, CD95, CD117, CD127, CD133, CD137 (4-1 BB), CD163, F4/80, IL-4Ra, Sca-1, CTLA-4, GITR, GARP, LAP, granzyme B, LFA-1, or transferrin receptor.

[0458] In some embodiments, the target biomarker comprises a growth factor, vascular endothelial growth factor (VEGF), TGF, TGFβ, PDGF, IGF, FGF, cytokine, lymphokine, hematopoietic factor, M-CSR, GM-CSF, TNF, interleukin, IL-1, IL-2, IL-3, IL-4, IL-5, IL-6, IL-7, IL-8, IL-9, IL-10, IL-11, IL-12, IL-13, IL-14, IL-15, IL-16, IL-17, IL18, IFN, TNF0, TNF1, TNF2, G-CSF, Meg-CSF, GM-CSF, thrombopoietin, stem cell factor, erythropoietin, hepatocyte growth factor/NK1, angiogenic factor, angiopoietin, Ang-1, Ang-2, Ang-4, Ang-Y, human angiopoietin-like polypeptide, angiogenin, morphogenic protein-1, bone morphogenic protein receptor, bone morphogenic protein receptor IA, bone morphogenic protein receptor IB, neurotrophic factor, chemotactic factor, CD proteins, CD3, CD4, CD8, CD19, CD20, erythropoietin, osteoinductive factors, immunotoxin, bone morphogenetic protein (BMP), interferon, interferon-alpha, interferon-beta, interferon-gamma, colony stimulating factor (CSF), M-CSF, GM-CSF, G-CSF, superoxide dismutase, T-cell receptor; surface membrane protein, decay accelerating factor, viral antigen, portion of the AIDS envelope, transport protein, homing receptor, addressin, regulatory protein, integrin, CD11a, CD11b, CD11c, CD18, ICAM, VLA-4, VCAM, tumor associated antigen, HER2, HER3, HER4, nucleophosmin, a heterogeneous nuclear ribonucleoproteins (hnRNPs), fibrillarin; or fragments or variants thereof.

[0459] In still other embodiments, the target biomarker is selected from the group consisting of epidermal growth factor receptor, transferrin receptor, platelet-derived growth factor receptor, Erb-B2, CD 19, CD20, CD45, CD52, Ep-CAM, alpha ([alpha])-fetoprotein, carcinoembryonic antigen peptide-1, caspase-8, CDC27, CDK4, carcino-embryonic antigen, calcium-activated chloride channel-2, cyclophilin B, differentiation antigen melanoma, elongation factor 2, Ephrin type-A receptor 2, 3, Fibroblast growth factor-5, fibronectin, glycoprotein 250, G antigen, N-acetylglucosaminyltransferase V, glycoprotein 100 kD, helicase antigen, human epidermal receptor-2/neurological, heat shock protein 70-2 mutated, human signet ring tumor-2, human telomerase reverse transcriptase, intestinal carboxyl esterase, interleukin 13 receptor [alpha]2 chain, [beta]-D-galactosidase 2-[alpha]-L-fucosyltransferase, melanoma antigen, melanoma antigen recognized by T cells-1/Melanoma antigen A, melanocortin 1 receptor, macrophage colony-stimulating factor, mucin 1, 2, melanoma ubiquitous mutated 1, 2, 3, New York-esophageous 1, ocular albinism type 1 protein, O-linked N-acetyl glucosamine transferase gene, protein 15, promyelocytic leukemia/retinoic acid receptor [alpha], prostate-specific antigen, prostate-specific membrane antigen, receptor-type protein-tyrosinephosphatase kappa, renal antigen, renal ubiquitous 1, 2, sarcoma antigen, squamous antigen rejecting tumor 1, 2, 3, synovial sarcoma, Survivin-2B, synaptotagmin I/synovial sarcoma, X fusion protein, translocation Ets-family leukemia/acute myeloid leukemia 1, transforming growth factor [beta] receptor 2, triosephosphate isomerase, taxol resistant associated protein 3, testin-related gene, tyrosinase related protein 1, and tyrosinase related protein 2.

[0460] The target biomarker can be a cancer-associated or tumor associated antigen. The cancer-associated antigen may include without limitation one or more of human Her2/neu, Her1/EGF receptor (EGFR), HER2 (ERBB2), Her3, Her4, A33 antigen, B7H3, CD5, CD19, CD20, CD22, CD23 (IgE Receptor), C242 antigen, 5T4, IL-6, IL-13, vascular endothelial growth factor VEGF (e.g., VEGF-A), VEGFR-1, VEGFR-2, CD30, CD33, CD37, CD40, CD44, CD51, CD52, CD56, CD74, CD80, CD152, CD200, CD221, CCR4, HLA-DR, CTLA-4, N PC-1C, tenascin, vimentin, insulin-like growth factor 1 receptor (IGF-1R), alpha-fetoprotein, insulin-like growth factor 1 (IGF-1), carbonic anhydrase 9 (CA-IX), carcinoem bryonic antigen (CEA), integrin αvβ3, integrin α5βt, folate receptor 1, transmembrane glycoprotein NMB, fibroblast activation protein alpha (FAP), glypican 1, glypican 3, glycoprotein 75, TAG-72, MUC1, MUC16 (also known as CA-125), phosphatidylserine, prostate-specific membrane antigen (PMSA), NR-LU-13 antigen, TRAIL-R1, tumor necrosis factor receptor superfamily member 10b (TNFRSF10B or TRAIL-R2), SLAM family member 7 (SLAM F7), EGP40 pancarcinoma antigen, B-cell activating factor (BAFF), platelet-derived growth factor receptor, glycoprotein EpCAM (17-1A), Programmed Death-1 (PD1), Programmed Death Ligand 1 (PD-L1), protein disulfide isomerase (PDI), Phosphatase of Regenerating Liver 3 (PRL-3), prostatic acid phosphatase, Lewis-Y antigen, GD2 (a disialoganglioside expressed on tumors of neuroectodermal origin), or mesothelin. For example, the target can be one or more of human Her2/neu, Her1/EGFR, TNF-α, B7H3 antigen, CD20, VEGF, CD52, CD33, CTLA-4, tenascin, alpha-4 (α4) integrin, IL-23, amyloid-β, Huntingtin, CD25, nerve growth factor (NGF), TrkA, and α-synuclein. In some embodiments, the target biomarker is a tumor antigen selected from the group consisting of PSMA, BRCA1, BRCA2, alpha-actinin-4, BCR-ABL fusion protein (b3a2), CASP-8, β-catenin, Cdc27, CDK4, dek-can fusion protein, Elongation factor 2, ETV6-AML1 fusion protein, LDLR-fucosyltransferase AS fusion protein, hsp70-2, KIAAO205, MART2, MUM-If, MUM-2, MUM-3, neo-PAP, Myosin class I, OS-9g, pml-RAR alpha fusion protein, PTPRK, K-ras, N-ras, CEA, gp100/Pmel17, Kallikrein 4, mammaglobin-A, Melan-A/MART-1, PSA, TRP-1/gp75, TRP-2, tyrosinase, CPSF, EphA3, G250/MN/CAIX, HER-2/neu, Intestinal carboxyl esterase, alpha-fetoprotein, M-CSF, MUC1, p53, PRAME, RAGE-1, RU2AS, survivin, Telomerase, WT1, or CA125. In still other embodiments, the target biomarker is a tumor antigen selected from the group consisting of 4-1BB, 5T4, AGS-5, AGS-16, Angiopoietin 2, B7.1, B7.2, B7DC, B7H1, B7H2, B7H3, BT-062, BTLA, CAIX, Carcinoembryonic antigen, CTLA4, Cripto, ED-B, ErbB1, ErbB2, ErbB3, ErbB4, EGFL7, EpCAM, EphA2, EphA3, EphB2, EphB3, FAP, Fibronectin, Folate Receptor, Ganglioside GM3, GD2, glucocorticoid-induced tumor necrosis factor receptor (GITR), gp100, gpA33, GPNMB, ICOS, IGFIR, Integrin av, Integrin αvβ, KIR, LAG-3, Lewis Y, Mesothelin, c-MET, MN Carbonic anhydrase IX, MUC1, MUC16, Nectin-4, NKGD2, NOTCH, OX40, OX40L, PD-1, PDL1, PSCA, PSMA, RANKL, ROR1, ROR2, SLC44A4, Syndecan-1, TACI, TAG-72, Tenascin, TIM3, TRAILR1, TRAILR2, VEGFR-1, VEGFR-2, VEGFR-3, and variants thereof. In still other embodiments, the target biomarker is a tumor-associated antigen selected from the group consisting of Lewis Y, Muc-1, erbB-2, -3 and -4, Ep-CAM, EGF-receptor (e.g., EGFR type I or EGFR type II), EGFR deletion neoepitope, CA19-9, Muc-1, LeY, TF-, Tn- and sTn-antigen, TAG-72, PSMA, STEAP, Cora antigen, CD7, CD19 and CD20, CD22, CD25, Ig-α and Ig-(3, A33 and G250, CD30, MCSP and gp100, CD44-v6, MT-MMPs, (MIS) receptor type II, carboanhydrase 9, F19-antigen, Ly6, desmoglein 4, PSCA, Wue-1, GD2 and GD3 as well as TM4SF-antigens (CD63, L6, CO-29, SAS) and the alpha and/or gamma subunit of the fetal type acetylcholinreceptor (AChR). The target biomarker can be a cancer antigen selected from A33, BAGE, Bel-2, β-catenin, CA125, CA19-9, CD5, CD19, CD20, CD21, CD22, CD33, CD37, CD45, CD123, CEA, c-Met, CS-1, cyclin B1, DAGE, EBNA, EGFR, ephrinB2, estrogen receptor, FAP, ferritin, folate-binding protein, GAGE, G250, GD-2, GM2, gp75, gp100 (Pmel 17), HER-2/neu, HPV E6, HPV E7, Ki-67, LRP, mesothelin, p53, PRAME, progesterone receptor, PSA, PSMA, MAGE, MART, mesothelin, MUC, MUM-1-B, myc, NYESO-1, ras, RORI, survivin, tenascin, TSTA tyrosinase, VEGF, and WT1. The target biomarker can also be a tumor antigen selected from carcinoembryonic antigen (CEA), alpha-fetoprotein (AFP), prostate specific antigen (PSA), prostate specific membrane antigen (PSMA), CA-125 (epithelial ovarian cancer), soluble Interleukin-2 (IL-2) receptor, RAGE-1, tyrosinase, MAGE-1, MAGE-2, NY-ESO-1, Melan-A/MART-1, glycoprotein (gp) 75, gp100, beta-catenin, PRAME, MUM-1, ZFP161, Ubiquilin-1, HOX-B6, YB-1, Osteonectin, ILF3, or IGF-1. In some embodiments, the cancer-related antigen is one or more of CD2, CD4, CD19, CD20, CD22, CD23, CD30, CD33, CD37, CD40, CD44v6, CD52, CD56, CD70, CD74, CD79a, CD80, CD98, CD138, EGFR (Epidermal growth factor receptor), VEGF (Vascular endothelial growth factor), VEGFR1 (Vascular endothelial growth factor receptor I), PDGFR (Platelet-derived growth factor receptor), RANKL (Receptor activator of nuclear factor kappa-B ligand), GPNMB (Transmembrane glycoprotein Neuromedin B), EphA 2 (Ephrin type-A receptor 2), PSMA (Prostate-specific membrane antigen), Cripto (Cryptic family protein 1B), EpCAM (Epithelial cell adhesion molecule), CTLA 4 (Cytotoxic T-Lymphocyte Antigen 4), IGF-IR (Type 1 insulin-like growth factor receptor), GP3 (M13 bacteriophage), GP9 (Glycoprotein IX (platelet), CD42a, GP 40 (Glycoprotein 40 kDa), GPC3 (glypican-3), GPC1 (glypican-1), TRAILR1 (Tumor necrosis factor-related apoptosis-inducing ligand receptor 1), TRAILR1I (Tumor necrosis factor-related apoptosis-inducing ligand receptor II), FAS (Type II transmembrane protein), PS (phosphatidyl serine) lipid, Gal GalNac Gal N-linked, Muc1 (Mucin 1, cell surface associated, PEM), Muc18, CD146, A5B1 integrin (α5β1), α4β1 integrin, av integrin (Vitronectin Receptor), Chondrolectin, CAIX (Carbonic anhydrase IX, gene G250/MN-encoded transmembrane protein), GD2 gangloside, GD3 gangloside, GM1 gangloside, Lewis Y, Mesothelin, HER2 (Human Epidermal Growth factor 2), HER3, HER4, FN14 (Fibroblast Growth Factor Inducible 14), CS1 (Cell surface glycoprotein, CD2 subset 1, CRACC, SLAMF7, CD319), 41BB CD137, SIP (Siah-1 Interacting Protein), CTGF (Connective tissue growth factor), HLADR (MHC class II cell surface receptor), PD-1 (Programmed Death 1, Type I membrane protein, PD-L1 (Programmed Death Ligand 1), PD-L2 (Programmed Death Ligand 2), IL-2 (Interleukin-2), IL-8 (Interleukin-8), IL-13 (Interleukin-13), PIGF (Phosphatidylinositol-glycan biosynthesis class F protein), NRP1 (Neuropilin-1), ICAM1, CD54, GC182 (Claudin 18.2), Claudin, HGF (Hepatocyte growth factor), CEA (Carcinoembryonic antigen), LTβR (lymphotoxin β receptor), Kappa Myeloma, Folate Receptor alpha, GRP78 (BIP, 78 kDa Glucose-regulated protein), A33 antigen, PSA (Prostate-specific antigen), CA 125 (Cancer antigen 125 or carbohydrate antigen 125), CA19.9, CA15.3, CA242, leptin, prolactin, osteopontin, IGF-II (Insulin-like growth factor 2), fascin, sPIgR (secreted chain of polymorphic immunoglobulin receptor), 14-3-3 protein eta, 5T4 oncofetal protein, ETA (epithelial tumor antigen), MAGE (Melanoma-associated antigen), MAPG (Melanoma-associated proteoglycan, NG2), vimentin, EPCA-1 (Early prostate cancer antigen-2), TAG-72 (Tumor-associated glycoprotein 72), factor VIII, Neprilysin (Membrane metallo-endopeptidase) and 17-1 A (Epithelial cell surface antigen 17-1A). The cancer antigen can be selected from the group consisting of carbonic anhydrase IX, alpha-fetoprotein, A3, antigen specific for A33 antibody, Ba 733, BrE3-antigen, CA125, CD1, CD1a, CD3, CD5, CD15, CD16, CD19, CD20, CD21, CD22, CD23, CD25, CD30, CD33, CD38, CD45, CD74, CD79a, CD80, CD138, colon-specific antigen-p (CSAp), CEA (CEACAM5), CEACAM6, CSAp, EGFR, EGP-1, EGP-2, Ep-CAM, Flt-1, Flt-3, folate receptor, HLA-DR, human chorionic gonadotropin (HCG) and its subunits, HER2/neu, hypoxia inducible factor (HIF-1), Ia, IL-2, IL-6, IL-8, insulin growth factor-1 (IGF-1), KC4-antigen, KS-1-antigen, KS1-4, Le-Y, macrophage inhibition factor (MIF), MAGE, MUC1, MUC2, MUC3, MUC4, MUC16, NCA66, NCA95, NCA90, antigen specific for PAM-4 antibody, placental growth factor, p53, prostatic acid phosphatase, PSA, PSMA, RS5, S100, TAC, TAG-72, tenascin, TRAIL receptors, Tn antigen, Thomson-Friedenreich antigens, tumor necrosis antigens, VEGF, ED-B fibronectin, 17-1A-antigen, an angiogenesis marker, an oncogene marker and an oncogene product.

[0461] The tumor marker can be a generic tumor marker or be associated with certain tumor types, such as those originating from different anatomical origins. In an embodiment, the tumor marker can be chosen to correspond to a certain tumor type. For example, exemplary tumor markers and associated tumor types include without limitation the following, listed as antigen (optional name) (cancer types): Alpha fetoprotein (AFP) (germ cell tumor, hepatocellular carcinoma); CA15-3 (breast cancer); CA27-29 (breast cancer); CA19-9 (mainly pancreatic cancer, but also colorectal cancer and other types of gastrointestinal cancer); CA-125 (ovarian cancer, endometrial cancer, fallopian tube cancer, lung cancer, breast cancer and gastrointestinal cancer); Calcitonin (medullary thyroid carcinoma); Calretinin (mesothelioma, sex cord-gonadal stromal tumour, adrenocortical carcinoma, synovial sarcoma); Carcinoembryonic antigen (gastrointestinal cancer, cervix cancer, lung cancer, ovarian cancer, breast cancer, urinary tract cancer); CD34 (hemangiopericytoma/solitary fibrous tumor, pleomorphic lipoma, gastrointestinal stromal tumor, dermatofibrosarcoma protuberans); CD99 (MIC2) (Ewing sarcoma, primitive neuroectodermal tumor, hemangiopericytoma/solitary fibrous tumor, synovial sarcoma, lymphoma, leukemia, sex cord-gonadal stromal tumour); CD117 (gastrointestinal stromal tumor, mastocytosis, seminoma); Chromogranin (neuroendocrine tumor); Chromosomes 3, 7, 17, and 9p21 (bladder cancer); Cytokeratin (various types) (various carcinoma, some types of sarcoma); Desmin (smooth muscle sarcoma, skeletal muscle sarcoma, endometrial stromal sarcoma); Epithelial membrane antigen (EMA) (many types of carcinoma, meningioma, some types of sarcoma); Factor VIII (CD31, FL1) (vascular sarcoma); Glial fibrillary acidic protein (GFAP) (glioma (astrocytoma, ependymoma)); Gross cystic disease fluid protein (GCDFP-15) (breast cancer, ovarian cancer, salivary gland cancer); HMB-45 (melanoma, PEComa (for example angiomyolipoma), clear cell carcinoma, adrenocortical carcinoma); Human chorionic gonadotropin (hCG) (gestational trophoblastic disease, germ cell tumor, choriocarcinoma); Immunoglobulin (lymphoma, leukemia); Inhibin (sex cord-gonadal stromal tumour, adrenocortical carcinoma, hemangioblastoma); keratin (various types) (carcinoma, some types of sarcoma); lymphocyte marker (various types, lymphoma, leukemia); MART-1 (Melan-A) (melanoma, steroid-producing tumors (adrenocortical carcinoma, gonadal tumor)); Myo D1 (rhabdomyosarcoma, small, round, blue cell tumour); muscle-specific actin (MSA) (myosarcoma (leiomyosarcoma, rhabdomyosarcoma); neurofilament (neuroendocrine tumor, small-cell carcinoma of the lung); neuron-specific enolase (NSE) (neuroendocrine tumor, small-cell carcinoma of the lung, breast cancer); placental alkaline phosphatase (PLAP) (seminoma, dysgerminoma, embryonal carcinoma); prostate-specific antigen (prostate); PTPRC (CD45) (lymphoma, leukemia, histiocytic tumor); S100 protein (melanoma, sarcoma (neurosarcoma, lipoma, chondrosarcoma), astrocytoma, gastrointestinal stromal tumor, salivary gland cancer, some types of adenocarcinoma, histiocytic tumor (dendritic cell, macrophage)); smooth muscle actin (SMA) (gastrointestinal stromal tumor, leiomyosarcoma, PEComa); synaptophysin (neuroendocrine tumor); thyroglobulin (thyroid cancer but not typically medullary thyroid cancer); thyroid transcription factor-1 (all types of thyroid cancer, lung cancer); Tumor M2-PK (colorectal cancer, Breast cancer, renal cell carcinoma, Lung cancer, Pancreatic cancer, Esophageal Cancer, Stomach Cancer, Cervical Cancer, Ovarian Cancer); Vimentin (sarcoma, renal cell carcinoma, endometrial cancer, lung carcinoma, lymphoma, leukemia, melanoma). Additional tumor types and associated biomarkers comprise the following, listed as tumor type (markers): Colorectal (M2-PK, CEA, CA 19-9, CA 125); Breast (CEA, CA 15-3, Cyfra 21-1); Ovary (CEA, CA 19-9, CA 125, AFP, BHCG); Uterine (CEA, CA 19-9, CA 125, Cyfra 21-1, SCC); Prostate (PSA); Testicle (AFP, BHCG); Pancreas/Stomach (CEA, CA 19-9, CA 72-4); Liver (CEA, AFP); Oesophagus (CEA, Cyfra 21-1); Thyroid (CEA, NSE); Lung (CEA, CA 19-9, CA 125, NSE, Cyfra 21-1); Bladder (CEA, Cyfra 21-1, TPA). One or more of these markers can be used as the target biomarker recognized by the variable region of the multipartite construct of the invention.

[0462] In some embodiments of the invention, the target biomarker recognized by the variable region comprises one or more of PDGF, IgE, IgE Fcε R1, PSMA, CD22, TNF-alpha, CTLA4, PD-1, PD-L1, PD-L2, FcRIIB, BTLA, TIM-3, CD11c, BAFF, B7-X, CD19, CD20, CD25, and CD33. The target biomarker can also be a protein comprising one or more of insulin-like growth factor 1 receptor (IGF1R), IGF2R, insulin-like growth factor (IGF), mesenchymal epithelial transition factor receptor (c-met), hepatocyte growth factor (HGF), epidermal growth factor receptor (EGFR), ErbB2, ErbB3, epidermal growth factor (EGF), heregulin, fibroblast growth factor receptor (FGFR), platelet-derived growth factor receptor (PDGFR), platelet-derived growth factor (PDGF), vascular endothelial growth factor receptor (VEGFR), vascular endothelial growth factor (VEGF), tumor necrosis factor receptor (TNFR), tumor necrosis factor alpha (TNF-α), folate receptor (FOLR), folate, transferrin receptor (TfR), mesothelia, Fc receptor, c-kit receptor, c-kit, a4 integrin, P-selectin, sphingosine-1-phosphate receptor-1 (S1PR), hyaluronate receptor, leukocyte function antigen-1 (LFA-1), CD4, CD11, CD18, CD20, CD25, CD27, CD52, CD70, CD80, CD85, CD95 (Fas receptor), CD106 (vascular cell adhesion molecule 1 (VCAM1)), CD166 (activated leukocyte cell adhesion molecule (ALCAM)), CD 178 (Fas ligand), CD253 (TNF-related apoptosis-inducing ligand (TRAIL)), inducible costimulator (ICOS) ligand, CCR2, CXCR3, CCR5, CXCL12 (stromal cell-derived factor 1 (SDF-1)), interleukin 1 (IL-1), cytotoxic T-lymphocyte antigen 4 (CTLA-4), MART-1, gp100, MAGE-1, ephrin (Eph) receptor, mucosal addressin cell adhesion molecule 1 (MAdCAM-1), carcinoembryonic antigen (CEA), LewisY, MUC-1, epithelial cell adhesion molecule (EpCAM), cancer antigen 125 (CA125), prostate specific membrane antigen (PSMA), TAG-72 antigen, and fragments thereof. In various embodiments, the target biomarker comprises one or more of PSMA, PSCA, e selectin, an ephrin, ephB2, cripto-1, TENB2 (TEMFF2), ERBB2 receptor (HER2), MUC1, CD44v6, CD6, CD19, CD20, CD22, CD23, CD25, CD30, CD33, CD56, IL-2 receptor, HLA-DR10 B subunit, EGFR, CA9, caveolin-1 and nucleolin.

[0463] The target biomarker can be a microvesicle antigen, such as a microvesicle antigen selected from any of Table 3, Table 4, Tables 18-26, or Table 45. For example, the target biomarker can be one or more microvesicle antigen selected from CD9, EphA2, EGFR, B7H3, PSMA, PCSA, CD63, STEAP, CD81, B7H3, STEAP1, ICAM1 (CD54), A33, DR3, CD66e, MFG-e8, Hepsin, TMEM211, TROP-2, EGFR, Mammoglobin, Hepsin, NPGP/NPFF2, PSCA, 5T4, NGAL, NK-2, EpCam, NK-1R, 5T4, PAI-1, and CD45. The target biomarker can be one or more microvesicle antigen selected from SPB, SPC, NSE, PGP9.5, CD9, P2RX7, NDUFB7, NSE, Gal3, Osteopontin, CHI3L1, EGFR, B7H3, iC3b, MUC1, Mesothelin, SPA, TPA, PCSA, CD63, AQP5, DLL4, CD81, DR3, PSMA, GPCR 110 (GPR1 10), EPHA2, CEACAM, PTP, CABYR, TMEM211, ADAM28, UNC93a, A33, CD24, CD10, NGAL, EpCam, MUC17, TROP2 and MUC2. In some embodiments, the target biomarker comprises one or more microvesicle antigen selected from CD9, CD63, CD81, B7H3, PRO GRP, CYTO 18, FTH1, TGM2, CENPH, ANNEXIN I, ANNEXIN V, ERBB2, EGFR, CRP, VEGF, CYTO 19, CCL2, Osteopontin (OST19), Osteopontin (OST22), BTUB, CD45, TIMP, NACC1, MMP9, BRCA1, P27, NSE, M2PK, HCG, MUC1, CEA, CEACAM, CYTO 7, EPCAM, MS4A1, MUC1, MUC2, PGP9, SPA, SPA, SPD, P53, GPCR (GPR110), SFTPC, UNCR2, NSE, INGA3, INTO b4, MMP1, PNT, RACK1, NAP2, HLA, BMP2, PTH1R, PAN ADH, NCAM, CD151, CKS1, FSHR, HIF, KRAS, LAMP2, SNAIL, TRIM29, TSPAN1, TWIST1, ASPH and AURKB. In another embodiment, the target biomarker is selected from the group of proteins consisting of CD9, PSMA, PCSA, CD63, CD81, B7H3, IL 6, OPG-13, IL6R, PA2G4, EZH2, RUNX2, SERPINB3, and EpCam. In another embodiment, a target biomarker is selected from the group of proteins consisting of A33, a33 n15, AFP, ALA, ALIX, ALP, AnnexinV, APC, ASCA, ASPH (246-260), ASPH (666-680), ASPH (A-10), ASPH (D01P), ASPH (D03), ASPH (G-20), ASPH (H-300), AURKA, AURKB, B7H3, B7H4, BCA-225, BCNP1, BDNF, BRCA, CA125 (MUC16), CA-19-9, C-Bir, CD1.1, CD10, CD174 (Lewis y), CD24, CD44, CD46, CD59 (MEM-43), CD63, CD66e CEA, CD73, CD81, CD9, CDA, CDAC11a2, CEA, C-Erb2, C-erbB2, CRMP-2, CRP, CXCL12, CYFRA21-1, DLL4, DR3, EGFR, Epcam, EphA2, EphA2 (H-77), ER, ErbB4, EZH2, FASL, FRT, FRT c.f23, GDF15, GPCR, GPR30, Gro-alpha, HAP, HBD 1, HBD2, HER 3 (ErbB3), HSP, HSP70, hVEGFR2, iC3b, IL 6 Unc, IL-1B, IL6 Unc, IL6R, IL8, IL-8, INSIG-2, KLK2, L1CAM, LAMN, LDH, MACC-1, MAPK4, MART-1, MCP-1, M-CSF, MFG-E8, MIC1, MIF, MIS RII, MMG, MMP26, MMP7, MMP9, MS4A1, MUC1, MUC1 seq1, MUC1 seq11A, MUC17, MUC2, Ncam, NGAL, NPGP/NPFF2, OPG, OPN, p53, p53, PA2G4, PBP, PCSA, PDGFRB, PGP9.5, PIM1, PR (B), PRL, PSA, PSMA, PSME3, PTEN, R5-CD9 Tube 1, Reg IV, RUNX2, SCRN1, seprase, SERPINB3, SPARC, SPB, SPDEF, SRVN, STAT 3, STEAP1, TF (FL-295), TFF3, TGM2, TIMP-1, TIMP1, TIMP2, TMEM211, TMPRSS2, TNF-alpha, Trail-R2, Trail-R4, TrKB, TROP2, Tsg 101, TWEAK, UNC93A, VEGF A, and YPSMA-1. The target biomarker can be selected from the group of proteins consisting of 5T4, A33, ACTG1, ADAM10, ADAM15, AFP, ALA, ALDOA, ALIX, ALP, ALX4, ANCA, Annexin V, ANXA2, ANXA6, APC, APOA1, ASCA, ASPH, ATP1A1, AURKA, AURKB, B7H3, B7H4, BANK1, BASP1, BCA-225, BCNP1, BDNF, BRCA, C1orf58, C20orf114, C8B, CA125 (MUC16), CA-19-9, CAPZA1, CAV1, C-Bir, CCSA-2, CCSA-3&4, CD1.1, CD10, CD151, CD174 (Lewis y), CD24, CD2AP, CD37, CD44, CD46, CD53, CD59, CD63, CD66 CEA, CD73, CD81, CD82, CD9, CDA, CDAC1 1a2, CEA, C-Erbb2, CFL1, CFP, CHMP4B, CLTC, COTL1, CRMP-2, CRP, CRTN, CTNND1, CTSB, CTSZ, CXCL12, CYCS, CYFRA21-1, DcR3, DLL4, DPP4, DR3, EEF1A1, EGFR, EHD1, ENO1, EpCAM, EphA2, ER, ErbB4, EZH2, F11R, F2, F5, FAM125A, FASL, Ferritin, FNBP1L, FOLH1, FRT, GAL3, GAPDH, GDF15, GLB1, GPCR (GPR110), GPR30, GPX3, GRO-1, Gro-alpha, HAP, HBD 1, HBD2, HER 3 (ErbB3), HIST1H1C, HIST1H2AB, HNP1-3, HSP, HSP70, HSP90AB1, HSPA1B, HSPA8, hVEGFR2, iC3b, ICAM, IGSF8, IL 6, IL-1B, IL6R, IL8, IMP3, INSIG-2, ITGB1, ITIH3, JUP, KLK2, LiCAM, LAMN, LDH, LDHA, LDHB, LUM, LYZ, MACC-1, MAPK4, MART-1, MCP-1, M-CSF, MFGE8, MGAM, MGC20553, MIC1, MIF, MIS RII, MMG, MMP26, MMP7, MMP9, MS4A1, MUC1, MUC17, MUC2, MYH2, MYL6B, Ncam, NGAL, NME1, NME2, NNMT, NPGP/NPFF2, OPG, OPG-13, OPN, p53, PA2G4, PABPC1, PABPC4, PACSIN2, PBP, PCBP2, PCSA, PDCD6IP, PDGFRB, PGP9.5, PIM1, PR (B), PRDX2, PRL, PSA, PSCA, PSMA, PSMA1, PSMA2, PSMA4, PSMA6, PSMA7, PSMB1, PSMB2, PSMB3, PSMB4, PSMB5, PSMB6, PSMB8, PSME3, PTEN, PTGFRN, Rab-5b, Reg IV, RPS27A, RUNX2, SCRN1, SDCBP, seprase, Sept-9, SERINC5, SERPINB3, SERPINB3, SH3GL1, SLC3A2, SMPDL3B, SNX9, SPARC, SPB, SPDEF, SPON2, SPR, SRVN, SSX2, SSX4, STAT 3, STEAP, STEAP1, TACSTD1, TCN2, tetraspanin, TF (FL-295), TFF3, TGM2, THBS1, TIMP, TIMP1, TIMP2, TMEM211, TMPRSS2, TNF-alpha, TPA, TPI1, TPS, Trail-R2, Trail-R4, TrKB, TROP2, TROP2, Tsg 101, TUBB, TWEAK, UNC93A, VDAC2, VEGF A, VPS37B, YPSMA-1, YWHAG, YWHAQ, and YWHAZ. In another embodiment, the target biomarker is selected from the group of proteins consisting of 5T4, ACTG1, ADAM10, ADAM15, ALDOA, ANXA2, ANXA6, APOA1, ATP1A1, BASP1, C1orf58, C20orf114, C8B, CAPZA1, CAV1, CD151, CD2AP, CD59, CD9, CD9, CFL1, CFP, CHMP4B, CLTC, COTL1, CTNND1, CTSB, CTSZ, CYCS, DPP4, EEF1A1, EHD1, ENO1, F11R, F2, F5, FAM125A, FNBP1L, FOLH1, GAPDH, GLB1, GPX3, HIST1H1C, HIST1H2AB, HSP90AB1, HSPA1B, HSPA8, IGSF8, ITGB1, ITIH3, JUP, LDHA, LDHB, LUM, LYZ, MFGE8, MGAM, MMP9, MYH2, MYL6B, NME1, NME2, PABPC1, PABPC4, PACSIN2, PCBP2, PDCD6IP, PRDX2, PSA, PSMA, PSMA1, PSMA2, PSMA4, PSMA6, PSMA7, PSMB1, PSMB2, PSMB3, PSMB4, PSMB5, PSMB6, PSMB8, PTGFRN, RPS27A, SDCBP, SERINC5, SH3GL1, SLC3A2, SMPDL3B, SNX9, TACSTD1, TCN2, THBS1, TPI1, TSG101, TUBB, VDAC2, VPS37B, YWHAG, YWHAQ, and YWHAZ. In another embodiment, the target biomarker is selected from the group of proteins consisting of CD9, CD63, CD81, PSMA, PCSA, B7H3 and EpCam. In another embodiment, the target biomarker is selected from the group of proteins consisting of a tetraspanin, CD9, CD63, CD81, CD63, CD9, CD81, CD82, CD37, CD53, Rab-5b, Annexin V, MFG-E8, Muc1, GPCR 110, TMEM211 and CD24 In another embodiment, the target biomarker is selected from the group of proteins consisting of A33, AFP, ALIX, ALX4, ANCA, APC, ASCA, AURKA, AURKB, B7H3, BANK1, BCNP1, BDNF, CA-19-9, CCSA-2, CCSA-3&4, CD10, CD24, CD44, CD63, CD66 CEA, CD66e CEA, CD81, CD9, CDA, C-Erb2, CRMP-2, CRP, CRTN, CXCL12, CYFRA21-1, DcR3, DLL4, DR3, EGFR, Epcam, EphA2, FASL, FRT, GAL3, GDF15, GPCR (GPR110), GPR30, GRO-1, HBD 1, HBD2, HNP1-3, IL-1B, IL8, IMP3, LiCAM, LAMN, MACC-1, MGC20553, MCP-1, M-CSF, MIC1, MIF, MMP7, MMP9, MS4A1, MUC1, MUC17, MUC2, Ncam, NGAL, NNMT, OPN, p53, PCSA, PDGFRB, PRL, PSMA, PSME3, Reg IV, SCRN1, Sept-9, SPARC, SPON2, SPR, SRVN, TFF3, TGM2, TIMP-1, TMEM211, TNF-alpha, TPA, TPS, Trail-R2, Trail-R4, TrKB, TROP2, Tsg 101, TWEAK, UNC93A, and VEGFA. In another embodiment, the target biomarker is selected from the group of proteins consisting of CD9, EGFR, NGAL, CD81, STEAP, CD24, A33, CD66E, EPHA2, Ferritin, GPR30, GPR110, MMP9, OPN, p53, TMEM211, TROP2, TGM2, TIMP, EGFR, DR3, UNC93A, MUC17, EpCAM, MUC1, MUC2, TSG101, CD63, B7H3, CD24, and a tetraspanin. The target biomarker can be selected from the group of proteins consisting of 5HT2B, 5T4 (trophoblast), ACO2, ACSL3, ACTN4, ADAM10, AGR2, AGR3, ALCAM, ALDH6A1, ANGPTL4, ANO9, AP1G1, APC, APEX1, APLP2, APP (Amyloid precursor protein), ARCN1, ARHGAP35, ARL3, ASAH1, ASPH (A-10), ATP1B1, ATP1B3, ATP5I, ATP50, ATXN1, B7H3, BACE1, BAI3, BAIAP2, BCA-200, BDNF, BigH3, BIRC2, BLVRB, BRCA, BST2, C1GALT1, C1GALT1C1, C20orf3, CA125, CACYBP, Calmodulin, CAPN1, CAPNS1, CCDC64B, CCL2 (MCP-1), CCT3, CD10(BD), CD127 (IL7R), CD174, CD24, CD44, CD80, CD86, CDH1, CDH5, CEA, CFL2, CHCHD3, CHMP3, CHRDL2, CIB1, CKAP4, COPA, COX5B, CRABP2, CRIP1, CRISPLD1, CRMP-2, CRTAP, CTLA4, CUL3, CXCR3, CXCR4, CXCR6, CYB5B, CYB5R1, CYCS, CYFRA 21, DBI, DDX23, DDX39B, derlin 1, DHCR7, DHX9, DLD, DLL4, DNAJB1, DPP6, DSTN, eCadherin, EEF1D, EEF2, EFTUD2, EIF4A2, EIF4A3, EpCaM, EphA2, ER(1) (ESR1), ER(2) (ESR2), Erb B4, Erbb2, erbb3 (Erb-B3), ERLIN2, ESD, FARSA, FASN, FEN1, FKBP5, FLNB, FOXP3, FUS, Gal3, GCDPF-15, GCNT2, GNA12, GNG5, GNPTG, GPC1, GPC2, GPC3, GPC4, GPC5, GPC6, GPD2, GPER (GPR30), GSPT1, H3F3B, H3F3C, HADH, HAP1, HER3, HIST1H1C, HIST1H2AB, HIST1H3A, HIST1H3C, HIST1H3D, HIST1H3E, HIST1H3F, HIST1H3G, HIST1H3H, HIST1H3I, HIST1H3J, HIST2H2BF, HIST2H3A, HIST2H3C, HIST2H3D, HIST3H3, HMGB1, HNRNPA2B1, HNRNPAB, HNRNPC, HNRNPD, HNRNPH2, HNRNPK, HNRNPL, HNRNPM, HNRNPU, HPS3, HSP-27, HSP70, HSP90B1, HSPA1A, HSPA2, HSPA9, HSPE1, IC3b, IDE, IDH3B, IDO1, IFI30, IL1RL2, IL7, IL8, ILF2, ILF3, IQCG, ISOC2, IST1, ITGA7, ITGB7, junction plakoglobin, Keratin 15, KRAS, KRT19, KRT2, KRT7, KRT8, KRT9, KTN1, LAMP1, LMNA, LMNB1, LNPEP, LRPPRC, LRRC57, Mammaglobin, MAN1A1, MAN1A2, MART1, MATR3, MBD5, MCT2, MDH2, MFGE8, MFGE8, MGP, MMP9, MRP8, MUC1, MUC17, MUC2, MYO5B, MYOF, NAPA, NCAM, NCL, NG2 (CSPG4), Ngal, NHE-3, NME2, NONO, NPM1, NQO1, NT5E (CD73), ODC1, OPG, OPN (SC), OS9, p53, PACSIN3, PAICS, PARK7, PARVA, PC, PCNA, PCSA, PD-1, PD-L1, PD-L2, PGP9.5, PHB, PHB2, PIK3C2B, PKP3, PPL, PR(B), PRDX2, PRKCB, PRKCD, PRKDC, PSA, PSAP, PSMA, PSMB7, PSMD2, PSME3, PYCARD, RAB1A, RAB3D, RAB7A, RAGE, RBL2, RNPEP, RPL14, RPL27, RPL36, RPS25, RPS4X, RPS4Y1, RPS4Y2, RUVBL2, SET, SHMT2, SLAIN1, SLC39A14, SLC9A3R2, SMARCA4, SNRPD2, SNRPD3, SNX33, SNX9, SPEN, SPR, SQSTM1, SSBP1, ST3GAL1, STXBP4, SUB1, SUCLG2, Survivin, SYT9, TFF3 (secreted), TGOLN2, THBS1, TIMP1, TIMP2, TMED10, TMED4, TMED9, TMEM211, TOM1, TRAF4 (scaffolding), TRAIL-R2, TRAP1, TrkB, Tsg 101, TXNDC16, U2AF2, UEVLD, UFC1, UNC93a, USP14, VASP, VCP, VDAC1, VEGFA, VEGFR1, VEGFR2, VPS37C, WIZ, XRCC5, XRCC6, YB-1, YWHAZ, or any combination thereof. In other embodiments, the target biomarker is selected from the group consisting of p53, p63, p73, mdm-2, procathepsin-D, B23, C23, PLAP, CA125, MUC-1, HER2, NY-ESO-1, SCP1, SSX-1, SSX-2, SSX-4, HSP27, HSP60, HSP90, GRP78, TAG72, HoxA7, HoxB7, EpCAM, ras, mesothelin, survivin, EGFK, MUC-1, or c-myc. The microvesicle antigen can be from any of Tables 18-26 or Table 45.

[0464] One of skill will appreciate that the above biomarker listings are not intended to be mutually exclusive. For example, a single target biomarker can have one or more of the following attributes: cancer/tumor antigen, cell antigen, microvesicle antigen, membrane antigen, and any combination thereof. In some embodiments, the target biomarker will have all of these attributes.

[0465] As noted above, the IDM domain can be constructed to illicit a complement mediated immune response that can induce apoptosis. Such IDM can include but are not limited to C1q, C1r, C1s, C1, C3a, C3b, C3d, C5a, C2, C4, and cytokines. The IDM region may comprise an oligonucleotide sequence including without limitation Toll-Like Receptor (TLR) agonists like CpG sequences which are immunostimulatory and/or polyG sequences which can be anti-proliferative or pro-apoptotic. The moiety can be vaccine like moiety or antigen that stimulates an immune response. In an embodiment, the immune stimulating moiety comprises a superantigen. In some embodiments, the superantigen can be selected from the group consisting of staphylococcal enterotoxins (SEs), a Streptococcus pyogenes exotoxin (SPE), a Staphylococcus aureus toxic shock-syndrome toxin (TSST-1), a streptococcal mitogenic exotoxin (SME), a streptococcal superantigen (SSA), a hepatitis surface antigen, or a combination thereof. Other bacterial antigens that can be used with the invention comprise bacterial antigens such as Freund's complete adjuvant, Freund's incomplete adjuvant, monophosphoryl-lipid A/trehalose dicorynomycolate (Ribi's adjuvant), BCG (Calmette-Guerin Bacillus; Mycobacterium bovis), and Corynebacterium parvum. The immune stimulating moiety can also be a non-specific immunostimulant, such as an adjuvant or other non-specific immunostimulator. Useful adjuvants comprise without limitation aluminium salts, alum, aluminium phosphate, aluminium hydroxide, squalene, oils, MF59, and AS03 (“Adjuvant System 03”). The adjuvant can be selected from the group consisting of Cationic liposome-DNA complex JVRS-100, aluminum hydroxide vaccine adjuvant, aluminum phosphate vaccine adjuvant, aluminum potassium sulfate adjuvant, Alhydrogel, ISCOM(s)™, Freund's Complete Adjuvant, Freund's Incomplete Adjuvant, CpG DNA Vaccine Adjuvant, Cholera toxin, Cholera toxin B subunit, Liposomes, Saponin Vaccine Adjuvant, DDA Adjuvant, Squalene-based Adjuvants, Etx B subunit Adjuvant, IL-12 Vaccine Adjuvant, LTK63 Vaccine Mutant Adjuvant, TiterMax Gold Adjuvant, Ribi Vaccine Adjuvant, Montanide ISA 720 Adjuvant, Corynebacterium-derived P40 Vaccine Adjuvant, MPL™ Adjuvant, AS04, AS02, Lipopolysaccharide Vaccine Adjuvant, Muramyl Dipeptide Adjuvant, CRL1005, Killed Corynebacterium parvum Vaccine Adjuvant, Montanide ISA 51, Bordetella pertussis component Vaccine Adjuvant, Cationic Liposomal Vaccine Adjuvant, Adamantylamide Dipeptide Vaccine Adjuvant, Arlacel A, VSA-3 Adjuvant, Aluminum vaccine adjuvant, Polygen Vaccine Adjuvant, Adjumer™, Algal Glucan, Bay R1005, Theramide®, Stearyl Tyrosine, Specol, Algammulin, Avridine®, Calcium Phosphate Gel, CTA1-DD gene fusion protein, DOC/Alum Complex, Gamma Inulin, Gerbu Adjuvant, GM-CSF, GMDP, Recombinant hIFN-gamma/Interferon-g, Interleukin-1β, Interleukin-2, Interleukin-7, Sclavo peptide, Rehydragel LV, Rehydragel HPA, Loxoribine, MF59, MTP-PE Liposomes, Murametide, Murapalmitine, D-Murapalmitine, NAGO, Non-Ionic Surfactant Vesicles, PMMA, Protein Cochleates, QS-21, SPT (Antigen Formulation), nanoemulsion vaccine adjuvant, AS03, Quil-A vaccine adjuvant, RC529 vaccine adjuvant, LTR192G Vaccine Adjuvant, E. coli heat-labile toxin, LT, amorphous aluminum hydroxyphosphate sulfate adjuvant, Calcium phosphate vaccine adjuvant, Montanide Incomplete Seppic Adjuvant, Imiquimod, Resiquimod, AF03, Flagellin, Poly(I:C), ISCOMATRIX®, Abisco-100 vaccine adjuvant, Albumin-heparin microparticles vaccine adjuvant, AS-2 vaccine adjuvant, B7-2 vaccine adjuvant, DHEA vaccine adjuvant, Immunoliposomes Containing Antibodies to Costimulatory Molecules, SAF-1, Sendai Proteoliposomes, Sendai-containing Lipid Matrices, Threonyl muramyl dipeptide (TMDP), Ty Particles vaccine adjuvant, Bupivacaine vaccine adjuvant, DL-PGL (Polyester poly (DL-lactide-co-glycolide)) vaccine adjuvant, IL-15 vaccine adjuvant, LTK72 vaccine adjuvant, MPL-SE vaccine adjuvant, non-toxic mutant E112K of Cholera Toxin mCT-E112K, and Matrix-S. Additional adjuvants that can be used with the multipartite constructs of the invention can be identified using the Vaxjo database. See Sayers S, Ulysse G, Xiang Z, and He Y. Vaxjo: a web-based vaccine adjuvant database and its application for analysis of vaccine adjuvants and their uses in vaccine development. Journal of Biomedicine and Biotechnology. 2012; 2012:831486. Epub 2012 Mar. 13. PMID: 22505817; www.violinet.org/vaxjo/. Other useful non-specific immunostimulators comprise histamine, interferon, transfer factor, tuftsin, interleukin-1, female sex hormones, prolactin, growth hormone vitamin D, deoxycholic acid (DCA), tetrachlorodecaoxide (TCDO), and imiquimod or resiquimod, which are drugs that activate immune cells through the toll-like receptor 7. A multipartite construct can be created that comprises more than one immunomodulating moiety, e.g., using segments that span CpG sequences which are immunostimulatory with complement directed segments that can stimulate apoptosis.

### MODIFICATIONS

[0466] Modifications to the multipartite constructs can be made to alter desired characteristics, including without limitation in vivo stability, specificity, affinity, avidity or nuclease susceptibility. Alterations to the half life may improve stability in vivo or may reduce stability to limit in vivo toxicity. Such alterations can include mutations, truncations or extensions. The 5′ and/or 3′ ends of the multipartite oligonucleotide constructs can be protected or deprotected to modulate stability as well. Modifications to improve in vivo stability, specificity, affinity, avidity or nuclease susceptibility or alter the half life to influence in vivo toxicity may be at the 5′ or 3′ end and include but are not limited to the following: LNA incorporation, phosphorothioate backbone instead of phosphodiester backbone, amino modifiers (i.e. C6-dT), dye conjugates (Cy dues, Fluorophores, etc), Biotinylation, PEG linkers, Click chemistry linkers, dideoxynucleotide end blockers, inverted end bases, cholesterol TEG or other lipid based labels.

[0467] Linkage options for segments of the multipartite construct can be on the 5′ or 3′ end of an oligonucleotide or to a primary amine, sulfhydryl or carboxyl group of an antibody and include but are not limited to the following: Biotin-target oligonucleotide/Ab, streptavidin-complement oligonucleotide or vice versa, amino modified-target Ab/oligonucleotide, thiol/carboxy-complement oligonucleotide or vice versa, Click chemistry-target Ab/oligonucleotide, corresponding Click chemistry partner-complement oligonucleotide or vice versa. The linkages may be covalent or non-covalent and may include but are not limited to monovalent, multivalent (i.e. bi, tri or tetra-valent) assembly, to a DNA scaffold (i.e. DNA origami structure), drug/chemotherapeutic agent, nanoparticle, microparticle or a micelle or liposome.

[0468] A linker region can comprise a spacer with homo- or multifunctional reactive groups that can vary in length and type. These include but are not limited to the following: spacer C18, PEG4, PEG6, PEG8, and PEG12.

[0469] The multipartite oligonucleotide of the invention can further comprise additional elements to add desired biological effects. For example, the multipartite construct may comprise a membrane disruptive moiety. The multipartite construct may also be conjugated to one or more chemical moiety that provides such effects. For example, the multipartite construct may be conjugated to a detergent-like moiety to disrupt the membrane of a target cell or microvesicle. Useful ionic detergents include sodium dodecyl sulfate (SDS, sodium lauryl sulfate (SLS)), sodium laureth sulfate (SLS, sodium lauryl ether sulfate (SLES)), ammonium lauryl sulfate (ALS), cetrimonium bromide, cetrimonium chloride, cetrimonium stearate, and the like. Useful non-ionic (zwitterionic) detergents include polyoxyethylene glycols, polysorbate 20 (also known as Tween 20), other polysorbates (e.g., 40, 60, 65, 80, etc), Triton-X (e.g., X100, X114), 3-[(3-cholamidopropyl)dimethylammonio]-1-propanesulfonate (CHAPS), CHAPSO, deoxycholic acid, sodium deoxycholate, NP-40, glycosides, octyl-thio-glucosides, maltosides, and the like. One of skill will appreciate that functional fragments, such as membrance disruptive moieties, can be covalently or non-covalently attached to the multipartite construct.

[0470] Oligonucleotide segments of a multipartite construct can include any desirable base modification known in the art. In certain embodiments, oligonucleotide segments are 10 to 50 nucleotides in length. One having ordinary skill in the art will appreciate that this embodies oligonucleotides of 10, 11, 12, 13, 14, 15, 16, 17, 18, 19, 20, 21, 22, 23, 24, 25, 26, 27, 28, 29, 30, 31, 32, 33, 34, 35, 36, 37, 38, 39, 40, 41, 42, 43, 44, 45, 46, 47, 48, 49, or 50 nucleotides in length, or any range derivable there within.

[0471] In certain embodiments, a multipartite construct comprises a chimeric oligonucleotide that contains two or more chemically distinct regions, each made up of at least one nucleotide. Such chimeras can be referred to using terms such as multipartite, multivalent, or the like. The oligonucleotides portions may contain at least one region of modified nucleotides that confers one or more beneficial properties, e.g., increased nuclease resistance, bioavailability, increased binding affinity for the target. Chimeric nucleic acids of the invention may be formed as composite structures of two or more oligonucleotides, two or more types of oligonucleotides (e.g., both DNA and RNA segments), modified oligonucleotides, oligonucleosides and/or oligonucleotide mimetics. Such compounds have also been referred to in the art as hybrids. Representative United States patents that teach the preparation of such hybrid structures comprise, but are not limited to, U.S. Pat. Nos. 5,013,830; 5,149,797; 5,220,007; 5,256,775; 5,366,878; 5,403,711; 5,491,133; 5,565,350; 5,623,065; 5,652,355; 5,652,356; and 5,700,922, each of which is herein incorporated by reference in its entirety.

[0472] In certain embodiments, a multipartite construct comprises at least one nucleotide modified at the 2′ position of the sugar, including without limitation a 2′-0-alkyl, 2′-0-alkyl-0-alkyl or 2′-fluoro-modified nucleotide. In other embodiments, RNA modifications include 2′-fluoro, 2′-amino and 2′ O-methyl modifications on the ribose of pyrimidines, a basic residue or an inverted base at the 3′ end of the RNA. Such modifications are routinely incorporated into oligonucleotides and these oligonucleotides have been shown to have higher target binding affinity in some cases than 2′-deoxyoligonucleotides against a given target.

[0473] A number of nucleotide and nucleoside modifications have been shown to make an oligonucleotide more resistant to nuclease digestion, thereby prolonging in vivo half-life. Specific examples of modified oligonucleotides include those comprising backbones comprising, for example, phosphorothioates, phosphotriesters, methyl phosphonates, short chain alkyl or cycloalkyl intersugar linkages or short chain heteroatomic or heterocyclic intersugar linkages. The constructs of the invention can comprise oligonucleotides with phosphorothioate backbones and/or heteroatom backbones, e.g., CH2-NH-0-CH2, CH, ˜N(CH3)˜0˜CH2 (known as a methylene(methylimino) or MMI backbone], CH2-O—N (CH3)-CH2, CH2-N(CH3)-N(CH3)-CH2 and O—N(CH3)-CH2-CH2 backbones, wherein the native phosphodiester backbone is represented as O— P— O— CH,); amide backbones (De Mesmaeker et ah, 1995); morpholino backbone structures (Summerton and Weller, U.S. Pat. No. 5,034,506); peptide nucleic acid (PNA) backbone (wherein the phosphodiester backbone of the oligonucleotide is replaced with a polyamide backbone, the nucleotides being bound directly or indirectly to the aza nitrogen atoms of the polyamide backbone (Nielsen, et al., 1991), each of which is herein incorporated by reference in its entirety. Phosphorus-containing linkages include, but are not limited to, phosphorothioates, chiral phosphorothioates, phosphorodithioates, phosphotriesters, aminoalkylphosphotriesters, methyl and other alkyl phosphonates comprising 3′alkylene phosphonates and chiral phosphonates, phosphinates, phosphoramidates comprising 3′-amino phosphoramidate and aminoalkylphosphoramidates, thionophosphoramidates, thionoalkylphosphonates, thionoalkylphosphotriesters, and boranophosphates having normal 3′-5′ linkages, 2′-5′ linked analogs of these, and those having inverted polarity wherein the adjacent pairs of nucleoside units are linked 3*-5* to 5*-3* or 2*-5* to 5*-2*; see U.S. Pat. Nos. 3,687,808; 4,469,863; 4,476,301; 5,023,243; 5,177,196; 5,188,897; 5,264,423; 5,276,019; 5,278,302; 5,286,717; 5,321,131; 5,399,676; 5,405,939; 5,453,496; 5,455,233; 5,466,677; 5,476,925; 5,519,126; 5,536,821; 5,541,306; 5,550,111; 5,563,253; 5,571,799; 5,587,361; and 5,625,050, each of which is herein incorporated by reference in its entirety. Morpholino-based oligomeric compounds are known in the art described in Braasch & Corey, Biochemistry vol. 41, no. 14, 2002, pages 4503-4510; Genesis vol. 30, 2001, page 3; Heasman, J. Dev. Biol. vol. 243, 2002, pages 209-214; Nasevicius et al. Nat. Genet. vol. 26, 2000, pages 216-220; Lacerra et al. Proc. Natl. Acad. Sci. vol. 97, 2000, pages 9591-9596 and U.S. Pat. No. 5,034,506, issued Jul. 23, 1991, each of which is herein incorporated by reference in its entirety. Cyclohexenyl nucleic acid oligonucleotide mimetics are described in Wang et al., J. Am. Chem. Soc. Vol. 122, 2000, pages 8595-8602, the contents of which is incorporated herein in its entirety. A multipartite construct of the invention can comprise at least such modification as desired.

[0474] Modified oligonucleotide backbones that do not include a phosphorus atom therein have backbones that can be formed by short chain alkyl or cycloalkyl internucleoside linkages, mixed heteroatom and alkyl or cycloalkyl internucleoside linkages, or one or more short chain heteroatomic or heterocyclic internucleoside linkages. These comprise those having morpholino linkages (formed in part from the sugar portion of a nucleoside); siloxane backbones; sulfide, sulfoxide and sulfone backbones; formacetyl and thioformacetyl backbones; methylene formacetyl and thioformacetyl backbones; alkene containing backbones; sulfamate backbones; methyleneimino and methylenehydrazino backbones; sulfonate and sulfonamide backbones; amide backbones; and others having mixed N, O, S and CH2 component parts; see U.S. Pat. Nos. 5,034,506; 5,166,315; 5,185,444; 5,214,134; 5,216,141; 5,235,033; 5,264,562; 5,264,564; 5,405,938; 5,434,257; 5,466,677; 5,470,967; 5,489,677; 5,541,307; 5,561,225; 5,596,086; 5,602,240; 5,610,289; 5,602,240; 5,608,046; 5,610,289; 5,618,704; 5,623,070; 5,663,312; 5,633,360; 5,677,437; and 5,677,439, each of which is herein incorporated by reference in its entirety. A multipartite construct of the invention can comprise at least such modification as desired.

[0475] In certain embodiments, a multipartite construct comprises one or more substituted sugar moieties, e.g., one of the following at the 2′ position: OH, SH, SCH₃, F, OCN, OCH₃OCH₃, OCH₃O(CH₂)n CH₃, O(CH₂)n NH₂ or O(CH₂)n CH₃ where n is from 1 to about 10; Ci to CIO lower alkyl, alkoxyalkoxy, substituted lower alkyl, alkaryl or aralkyl; CI; Br; CN; CF₃; OCF₃; O-, S-, or N-alkyl; O-, S-, or N-alkenyl; SOCH₃; SO₂CH₃; ONO₂; NO₂; N₃; NH₂; heterocycloalkyl; heterocycloalkaryl; aminoalkylamino; polyalkylamino; substituted silyl; an RNA cleaving group; a reporter group; an intercalator; a group for improving the pharmacokinetic properties of an oligonucleotide; or a group for improving the pharmacokinetic/pharmacodynamic properties of an oligonucleotide and other substituents having similar properties. A preferred modification includes 2′-methoxyethoxy [2′-0-CH2CH2OCH3, also known as 2′-0-(2-methoxyethyl)]. Other preferred modifications include 2*-methoxy (2*-0-CH3), 2*-propoxy (2*-OCH2 CH2CH3) and 2*-fiuoro (2*-F). Similar modifications may also be made at other positions on the oligonucleotide, e.g., the 3′ position of the sugar on the 3′ terminal nucleotide and the 5′ position of 5′ terminal nucleotide. Oligonucleotides may also have sugar mimetics such as cyclobutyls in place of the pentofuranosyl group.

[0476] In certain embodiments, a multipartite construct of the invention comprises one or more base modifications and/or substitutions. As used herein, “unmodified” or “natural” bases include adenine (A), guanine (G), thymine (T), cytosine (C) and uracil (U). Modified bases include, without limitation, bases found only infrequently or transiently in natural nucleic acids, e.g., hypoxanthine, 6-methyladenine, 5-Me pyrimidines, particularly 5-methylcytosine (also referred to as 5-methyl-2′ deoxy cytosine and often referred to in the art as 5-Me-C), 5-hydroxymethylcytosine (HMC), glycosyl HMC and gentobiosyl HMC, as well as synthetic bases, e.g., 2-aminoadenine, 2-(methylamino)adenine, 2-(imidazolylalkyl)adenine, 2-(aminoalklyamino)adenine or other heterosubstituted alkyladenines, 2-thiouracil, 2-thiothymine, 5-bromouracil, 5-hydroxymethyluracil, 8-azaguanine, 7-deazaguanine, N6 (6-aminohexyl)adenine and 2,6-diaminopurine (Kornberg, 1980; Gebeyehu, et ah, 1987). A “universal” base known in the art, e.g., inosine, can also be included. 5-Me-C substitutions can also be included. These have been shown to increase nucleic acid duplex stability by 0.6-1.20 C. See, e.g., Sanghvi et al., ‘Antisense Research & Applications’, 1993, CRC PRESS pages 276-278. Further suitable modified bases are described in U.S. Pat. Nos. 3,687,808, as well as U.S. Pat. Nos. 4,845,205; 5,130,302; 5,134,066; 5,175,273; 5,367,066; 5,432,272; 5,457,187; 5,459,255; 5,484,908; 5,502,177; 5,525,711; 5,552,540; 5,587,469; 5,596,091; 5,614,617; 5,750,692, and 5,681,941, each of which is herein incorporated by reference.

[0477] It is not necessary for all positions in a given oligonucleotide to be uniformly modified, and in fact more than one of the aforementioned modifications may be incorporated in a single oligonucleotide or even at within a single nucleoside within an oligonucleotide.

[0478] In certain embodiments, both a sugar and an internucleoside linkage, i.e., the backbone, of one or more nucleotide units within a multipartite construct are replaced with novel groups. The base can be maintained for hybridization with an appropriate nucleic acid target compound. One such oligomeric compound, an oligonucleotide mimetic that has been shown to retain hybridization properties, is referred to as a peptide nucleic acid (PNA). In PNA compounds, the sugar-backbone of an oligonucleotide is replaced with an amide containing backbone, for example, an aminoethylglycine backbone. The nucleobases are retained and are bound directly or indirectly to aza nitrogen atoms of the amide portion of the backbone. Representative patents that teach the preparation of PNA compounds comprise, but are not limited to, U.S. Pat. Nos. 5,539,082; 5,714,331; and 5,719,262, each of which is herein incorporated by reference. Further teaching of PNA compounds can be found in Nielsen et al. Science vol. 254, 1991, page 1497, which is herein incorporated by reference.

[0479] In certain embodiments, the multipartite construct is linked (covalently or non-covalently) to one or more moieties or conjugates that enhance activity, cellular distribution, or localization. Such moieties include, without limitation, lipid moieties such as a cholesterol moiety (Letsinger et al. Proc. Natl. Acad. Sci. Usa. vol. 86, 1989, pages 6553-6556), cholic acid (Manoharan et al. Bioorg. Med. Chem. Let. vol. 4, 1994, pages 1053-1060), a thioether, e.g., hexyl-S-tritylthiol (Manoharan et al. Ann. N. Y. Acad. Sci. Vol. 660, 1992, pages 306-309; Manoharan et al. Bioorg. Med. Chem. Let. vol. 3, 1993, pages 2765-2770), a thiocholesterol (Oberhauser et al. Nucl. Acids Res. vol. 20, 1992, pages 533-538), an aliphatic chain, e.g., dodecandiol or undecyl residues (Kabanov et al. Febs Lett. vol. 259, 1990, pages 327-330; Svinarchuk et al. Biochimie. vol. 75, 1993, pages 49-54), a phospholipid, e.g., di-hexadecyl-rac-glycerol or triethylammonium 1,2-di-O-hexadecyl-rac-glycero-3-H-phosphonate (Manoharan et al. Tetrahedron Lett. vol. 36, 1995, pages 3651-3654; Shea et al. Nucl. Acids Res. vol. 18, 1990, pages 3777-3783), a polyamine or a polyethylene glycol chain (Mancharan et al. Nucleosides & Nucleotides vol. 14, 1995, pages 969-973), or adamantane acetic acid (Manoharan et al. Tetrahedron Lett. vol. 36, 1995, pages 3651-3654), a palmityl moiety (Mishra et al. Biochim. Biophys. Acta vol. 1264, 1995, pages 229-237), or an octadecylamine or hexylamino-carbonyl-t oxycholesterol moiety (Crooke et al. J. Pharmacol. Exp. Ther. vol. 277, 1996, pages 923-937), each of which is herein incorporated by reference in its entirety. See also U.S. Pat. Nos. 4,828,979; 4,948,882; 5,218,105; 5,525,465; 5,541,313; 5,545,730; 5,552,538; 5,578,717; 5,580,731; 5,580,731; 5,591,584; 5,109,124; 5,118,802; 5,138,045; 5,414,077; 5,486,603; 5,512,439; 5,578,718; 5,608,046; 4,587,044; 4,605,735; 4,667,025; 4,762,779; 4,789,737; 4,824,941; 4,835,263; 4,876,335; 4,904,582; 4,958,013; 5,082,830; 5,112,963; 5,214,136; 5,082,830; 5,112,963; 5,214,136; 5,245,022; 5,254,469; 5,258,506; 5,262,536; 5,272,250; 5,292,873; 5,317,098; 5,371,241, 5,391,723; 5,416,203, 5,451,463; 5,510,475; 5,512,667; 5,514,785; 5,565,552; 5,567,810; 5,574,142; 5,585,481; 5,587,371; 5,595,726; 5,597,696; 5,599,923; 5,599,928 and 5,688,941, each of which is herein incorporated by reference in its entirety.

[0480] The multipartite construct of the invention can be modified to incorporate a wide variety of modified nucleotides as desired. For example, the construct may be synthesized entirely of modified nucleotides or with a subset of modified nucleotides. The modifications can be the same or different. Some or all nucleotides may be modified, and those that are modified may contain the same modification. For example, all nucleotides containing the same base may have one type of modification, while nucleotides containing other bases may have different types of modification. All purine nucleotides may have one type of modification (or are unmodified), while all pyrimidine nucleotides have another, different type of modification (or are unmodified). Thus, the construct may comprise any combination of desired modifications, including for example, ribonucleotides (2′-OH), deoxyribonucleotides (2′-deoxy), 2′-amino nucleotides (2′-NH2), 2′-fluoro nucleotides (2′-F) and 2′-O-methyl (2′-OMe) nucleotides.

[0481] In some embodiments, the multipartite construct is synthesized using a transcription mixture containing modified nucleotides in order to generate a modified construct. For example, a transcription mixture may contain only 2′-OMe A, G, C and U and/or T triphosphates (2′-OMe ATP, 2′-OMe UTP and/or 2*-OMe TTP, 2*-OMe CTP and 2*-OMe GTP), referred to as an MNA or mRmY mixture. Oligonucleotides generated therefrom are referred to as MNA oligonucleotides or mRmY oligonucleotides and contain only 2′-O-methyl nucleotides. A transcription mixture containing all 2′-OH nucleotides is referred to as an “rN” mixture, and oligonucleotides generated therefrom are referred to as “rN”, “rRrY” or RNA oligonucleotides. A transcription mixture containing all deoxy nucleotides is referred to as a “dN” mixture, and oligonucleotides generated therefrom are referred to as “dN”, “dRdY” or DNA oligonucleotides. Alternatively, a subset of nucleotides (e.g., C, U and/or T) may comprise a first modified nucleotides (e.g, 2′-OMe) nucleotides and the remainder (e.g., A and G) comprise a second modified nucleotide (e.g., 2′-OH or 2′-F). For example, a transcription mixture containing 2′-F U and 2′-OMe A, G and C is referred to as a “fUmV” mixture, and oligonucleotides generated therefrom are referred to as “fUmV” oligonucleotides. A transcription mixture containing 2′-F A and G, and 2′-OMe C and U and/or T is referred to as an “fRmY” mixture, and oligonucleotides generated therefrom are referred to as “fRmY” oligonucleotides. A transcription mixture containing 2′-F A and 2′-OMe C, G and U and/or T is referred to as “fAmB” mixture, and oligonucleotides generated therefrom are referred to as “fAmB” oligonucleotides.

[0482] One of skill in the art can improve pre-identified aptamer segments (e.g., variable regions or immunomodulatory regions that comprise an aptamer to a biomarker target or other entity) using various process modifications. Examples of such process modifications include, but are not limited to, truncation, deletion, substitution, or modification of a sugar or base or internucleotide linkage, capping, and PEGylation. In addition, the sequence requirements of an aptamer may be explored through doped reselections or aptamer medicinal chemistry. Doped reselections are carried out using a synthetic, degenerate pool that has been designed based on the aptamer of interest. The level of degeneracy usually varies from about 70-85% from the aptamer of interest. In general, sequences with neutral mutations are identified through the doped reselection process. Aptamer medicinal chemistry is an aptamer improvement technique in which sets of variant aptamers are chemically synthesized. These variants are then compared to each other and to the parent aptamer. Aptamer medicinal chemistry is used to explore the local, rather than global, introduction of substituents. For example, the following modifications may be introduced: modifications at a sugar, base, and/or internucleotide linkage, such as 2′-deoxy, 2′-ribo, or 2′-O-methyl purines or pyrimidines, phosphorothioate linkages may be introduced between nucleotides, a cap may be introduced at the 5′ or 3′ end of the aptamer (such as 3′ inverted dT cap) to block degradation by exonucleases, or a polyethylene glycol (PEG) element may be added to the aptamer to increase the half-life of the aptamer in the subject.

[0483] Additional compositions comprising a multipartite construct of the invention and uses thereof are further described below.

### Personalized Multipartite Constructs

[0484] The oligonucleotide probe libraries of the invention can be used to construct personalized multipartite constructs. As an example, an oligonucleotide probe library can be used to probe a sample from a patient. The biomarker targets are identified for library members that preferentially recognize diseased cells, e.g., cancer cells, from the individual. Such methodology is described herein. See, e.g., Example 23. The variable region of one or more oligonucleotide probe to the patient's diseased cells is used to synthesize a multipartite construct of the invention. Such construct can be used as a personalized treatment for the patient. FIG. 23E illustrates a flow chart of this approach. An oligonucleotide probe library 2351 is contacted with patient sample 2352. The sample can be any useful patient sample, including without limitation tissue such as biopsy or tissue removed during surgical or other procedures, bodily fluids, frozen sections taken for histological purposes, cell cultures, and various embodiments, fractions, and components of any thereof as described herein. See, e.g., section entitled “Samples” above. Oligonucleotide probes that bind the patient sample are identified 2353. Methodology for identifying oligonucleotide probe members that bind a biological sample is described herein, and includes without limitation sequence analysis such as next generation sequencing, amplification and/or hybridization approaches. In an embodiment, flow sorting is used to separate diseased cells from the contacted patient sample and sorted and bound oligonucleotides are identified 2353. In an optional step, the biomarkers recognized by the oligonucleotide probe binders are identified 2354. This step can be optional as the target biomarker of a disease-specific oligonucleotide probe may not be necessary to synthesize a multipartite construct specific for the patient's disease. However, the identification of the target may assist in design of the multipartite construct. For example, identification of the target may allow computer modeling of the construct's in vivo interactions or help to select the most promising probe from multiple candidates, e.g., by avoiding toxicity associated with non-disease specific targets. The oligonucleotide probe binders are used to create a multipartite construct of the invention 2355. The multipartite construct can be as shown in FIG. 23A or variants thereof. In an embodiment, the variable region of an oligonucleotide probe binder is used as the variable region as shown in FIG. 23A. The multipartite construct can be administered to the patient 2356, thereby providing a personalized therapy for the patient. Further as noted in the figure, constructs comprising the variable region of an oligonucleotide probe binder can be used for other purposes, such as disease monitoring 2357. As an example of such methodology, the oligonucleotide probe binder can be used to detect the presence or absence of disease markers in the patient over time such as in an immunoassay format.

### Anti-C1q Oligonucleotides

[0485] The complement system is a part of the immune system that enhances (complements) the ability of antibodies and phagocytic cells to clear microbes and damaged cells from an organism. It is part of the innate immune system, which is not adaptable and does not change over the course of an individual's lifetime. However, it can be recruited and brought into action by the adaptive immune system. Complement activation or fixation can stimulate phagocytes to clear foreign and damaged material, induce inflammation to attract additional phagocytes, and activate the cell-killing membrane attack complex. The “classical” complement pathway is triggered by activation of the C1-complex, which occurs when C1q binds to IgM or IgG complexed with antigens. The C1-complex is composed of 1 molecule of C1q, 2 molecules of C1r and 2 molecules of C1s, or C1qr₂s₂. Such immunoglobulin-mediated binding of the complement uses the ability of the immunoglobulin system to detect and bind to non-self antigens. C1q can also directly identify various structures and ligands on microbial surfaces and apoptotic cells, and binds additional self proteins including C-reactive protein (CRP), HIV-1, phosphatidylserine (PS), HTLV-1, and others. Because the complement system has the potential to be extremely damaging to host tissues, its activation must be tightly regulated. The classical pathway is inhibited by C1-inhibitor, which binds to C1 to prevent its activation. C1q also performs a number of non-complement functions, including without limitation such diverse functions as clearance of bacterial pathogens, induction of angiogenesis during wound healing, tolerance induction, anti-inflammatory responses and inhibiting T cell response. As a result of these diverse functions, complement and C1q play a role in diverse diseases and disorders, including without limitation autoimmune settings, pregnancy disorders, pathogen infection, aggregated proteins leading to neurodegenerative diseases, inflammation, and cancer. Deficiencies have been associated with autoimmune disease (e.g., systemic lupus erythematosus), pathogen infection and cancer. However, the tumor microenvironment may also hijack C1q to promote cell adhesion, migration and proliferation. See, e.g., Kouser et al., Emerging and Novel Functions of Complement Protein C1q, Front Immunol. 2015; 6: 317. Published online 2015 Jun. 29; Son et al., Fundamental role of C1q in autoimmunity and inflammation, Immunol Res. 2015 December; 63(1-3): 101-106; Ghebrehiwet et al., The C1q Family of Proteins: Insights into the Emerging Non-Traditional Functions, Front Immunol. 2012; 3: 52; Nayak et al., Complement and non-complement activating functions of C1q: a prototypical innate immune molecule. Innate Immun. 2012 April; 18(2):350-63. C1q is a Cα2+ dependent hexameric complex comprised of 18 polypeptide chains, 6 of three different subunits (C1q A chain (P02745), C1q B chain (P02746), and C1q C chain (P02747)), that binds C1r and C1s to form the C1 complex, the first component in classical pathway of complement. C1q globular heads form a pattern recognition complex that binds to various targets, including without limitation clustered antigen-antibody Fe immune complexes (e.g., IgG, IgM), C-reactive protein (CRP), abnormal proteins (e.g., prion and beta-amyloid), apoptotic and secondary necrotic cells, phosphatidylserine and the surface of a subpopulation of microparticles in human plasma. Recognition of IgG and IgM on a cell surface can induce a complement cascade and lead to apoptosis. See, e.g., Kishore et al., C1q and tumor necrosis factor superfamily: modularity and versatility, TRENDS in Immunology 25 (2004) 551-561; Nayak et al., Complement and non-complement activating functions of C1q: a prototypical innate immune molecule, Innate Immunity 18 (2012) 350-363. Aptamer-biotin-C1q protein conjugates have been used to induce complement mediated cell death. See, e.g., Bruno, Aptamer-biotin-streptavidin-C1q complexes can trigger the classical complement pathway to kill cancer cells, In Vitro Cell Dev Biol—Animal (2010) 46:107-113.

[0486] C1q globular heads has been shown to bind DNA and recognize apoptotic cells. See, e.g., Paidassi et al., The lectin-like activity of human C1q and its implication in DNA and apoptotic cell recognition, FEBS Letters 582 (2008) 3111-3116; Navratil et al., The globular heads of C1q specifically recognize surface blebs of apoptotic vascular endothelial cells, J Immunol 166 (2001) 3231-3239. DNA binds C1qA and activates the complement cascade without interfering with the ability of C1q to bind antibody Fc regions. See, e.g., Jiang et al., DNA binds and activates complement via residues 14-26 of the human C1q A chain, J Biol Chem 267 (1992) 25597-25601; Garlatti, et al. Cutting edge: C1q binds deoxyribose and heparan sulfate through neighboring sites of its recognition domain, J Immunol 185 (2010) 808-812.

[0487] C1q protein quantification has been used for disease monitoring and monoclonal antibody (mAb) production. For example, C1q mAb is used to coat ELISA plates to capture and quantitate immune complexes in clinical samples. Various companies sell diagnostic kits for immune complex detection and quantitation which are based on the ability of C1q to bind well to immune complexes, but to not bind significantly to monomeric immunoglobulins. Because the DNA recognition domain of C1q does not overlap with the Fc-recognition domain, a DNA based ELISA may further allow a more accurate quantitation of immune complex detection.

[0488] Example 35 herein presents identification of an anti-C1q oligonucleotide aptamers and describes various uses thereof. The aptamers to C1q were identified via oligonucleotide probe analysis of plasma microvesicles followed by identification of oligonucleotide probe targets using gel electrophoresis and mass spectrometry analysis.

[0489] Anti-C1q aptamers of the invention can be used for multiple purposes. As described above, the invention provides a multipartite construct having a disease specific target oligonucleotide or antibody (Ab) that can recognize a target of interest and an immunomodulatory region. In an embodiment of the invention, the immunomodulatory region comprises the C1q aptamer. Such construct can act as an immunotherapeutic agent for targeted cell killing via recruitment of complement proteins and the downstream membrane attack complex (MAC). By linking the C1q aptamer segment to another segment that specifically binds to a target of interest (e.g., a biomarker present on a cell or microvesicle of interest), the construct can bring C1q into proximity of a target. See FIG. 23C, which illustrates a construct 2331 having a segment that recognizes a Marker of Interest 2332 on a Membrane 2333, and another segment that attracts the Complement system 2334. Such binding can cause a complement cascade and induce complement mediated cell killing. This approach can be applied in multiple setting, e.g., to recognize cancer cells, gram negative bacteria, and/or viral and/or parasitic infections. For example, an anti-CD20 specific oligonucleotide can be linked with an anti-C1q specific oligonucleotide. The linkage to create the oligonucleotide-oligonucleotide construct can include but is not limited to direct synthesis with a spacer between the two oligonucleotide recognition sites. Different biomarkers can be used as the target of interest, thereby directing the complement cascade to the various targets as desired. The spacer type and size can be configured based on steric hindrance between the target protein and the C1q protein/MAC complex. As noted above, the target specific oligonucleotides/Abs can be chosen to specially recognize various targets of interest, including but not limited to cancer cells, circulating tumor cells, immune cells (e.g., B-cells, T-cells, neutrophils, macrophage, dendritic cells) microvesicles, bacteria, viruses or parasites. In addition to C1q, the target of the complement specific oligonucleotide segment can include without limitation C1r, C1s, C1, C3a, C3b, C3d, C5a, C2, C4, and cytokines.

[0490] The multipartite construct of the invention can comprise a linear molecule, a circular molecule, and/or adopt various secondary structures. FIG. 23D illustrates a construct 2340 having a C1 q recruiting domain 2341 (nucleotides 37-77) and a C-met targeting domain 2342 (nucleotides 1-36). As desired, the C1q recruiting domain 2341 can comprise an anti-C1q oligonucleotide sequence of the invention. See e.g., Example 35. As shown in the illustration, the C1q recruiting domain 2341 comprises a single stranded hairpin and a complementary base pairing region, and the C-met targeting domain 2342 comprises a complementary base pairing region and a region having a more complex secondary structure. Such structures can be estimated using available software programs such as Vienna or mfold (available at mfold.rit.albany.edu). Such structural estimates can also be used to design derivatives of the sequences, e.g., by substituting, adding or deleting nucleotides in order to increase or decrease melting temperature, facilitate additions of non-natural nucleotide analogs, direct chemical modification, and/or manipulate structure or other parameters.

[0491] The invention further provides a method of molecular profiling of patient specific autoantigens by identifying autoantigens bound to complement 1 (C1) in plasma. The invention also provides immunoassays that detect levels of C1q protein. Such assays can be any applicable immunoassay format using the anti-C1q oligonucleotide of the invention, including without limitation an oligonucleotide based ELISA, Western analysis, flow cytometry, or affinity isolation. The immunoassay can be applied to various settings, including without limitation: 1) monitor cancer patient specific immune responses before, during and after administration of immunosuppressing drugs for optimal treatment with chemotherapeutic agents; 2) monitor immune responses in patients with autoimmune disorders in response to administration of immunosuppressing drugs such as TNF blockers; 3) detect levels of C1q and/or anti-C1q autoantibodies in patients with systemic lupus erythematosus (SLE); 4) quantitative C1q assay for mAb biosimilar production to satisfy the EMA biosimilar antibody guidance measures; 5) a WHO secondary test as a companion test to mAb based ELISAs; 6) as a marker for apoptosis/secondary necrosis; and 7) a C1q test for research purposes.

### Pharmaceutical Compositions

[0492] In an aspect, the invention provides pharmaceutical compositions comprising the multipartite constructs of the invention as described above. The invention further provides methods of administering such compositions.

[0493] The term “condition,” as used herein means an interruption, cessation, or disorder of a bodily function, system, or organ. Representative conditions include, but are not limited to, diseases such as cancer, inflammation, diabetes, and organ failure.

[0494] The phrase “treating,” “treatment of,” and the like include the amelioration or cessation of a specified condition.

[0495] The phrase “preventing,” “prevention of,” and the like include the avoidance of the onset of a condition.

[0496] The term “salt,” as used herein, means two compounds that are not covalently bound but are chemically bound by ionic interactions.

[0497] The term “pharmaceutically acceptable,” as used herein, when referring to a component of a pharmaceutical composition means that the component, when administered to an animal, does not have undue adverse effects such as excessive toxicity, irritation, or allergic response commensurate with a reasonable benefit/risk ratio. Accordingly, the term “pharmaceutically acceptable organic solvent,” as used herein, means an organic solvent that when administered to an animal does not have undue adverse effects such as excessive toxicity, irritation, or allergic response commensurate with a reasonable benefit/risk ratio. Preferably, the pharmaceutically acceptable organic solvent is a solvent that is generally recognized as safe (“GRAS”) by the United States Food and Drug Administration (“FDA”). Similarly, the term “pharmaceutically acceptable organic base,” as used herein, means an organic base that when administered to an animal does not have undue adverse effects such as excessive toxicity, irritation, or allergic response commensurate with a reasonable benefit/risk ratio.

[0498] The phrase “injectable” or “injectable composition,” as used herein, means a composition that can be drawn into a syringe and injected subcutaneously, intraperitoneally, or intramuscularly into an animal without causing adverse effects due to the presence of solid material in the composition. Solid materials include, but are not limited to, crystals, gummy masses, and gels. Typically, a formulation or composition is considered to be injectable when no more than about 15%, preferably no more than about 10%, more preferably no more than about 5%, even more preferably no more than about 2%, and most preferably no more than about 1% of the formulation is retained on a 0.22 μm filter when the formulation is filtered through the filter at 98° F. There are, however, some compositions of the invention, which are gels, that can be easily dispensed from a syringe but will be retained on a 0.22 μm filter. In one embodiment, the term “injectable,” as used herein, includes these gel compositions. In one embodiment, the term “injectable,” as used herein, further includes compositions that when warmed to a temperature of up to about 40° C. and then filtered through a 0.22 μm filter, no more than about 15%, preferably no more than about 10%, more preferably no more than about 5%, even more preferably no more than about 2%, and most preferably no more than about 1% of the formulation is retained on the filter. In one embodiment, an example of an injectable pharmaceutical composition is a solution of a pharmaceutically active compound (for example, a multipartite construct) in a pharmaceutically acceptable solvent. One of skill will appreciate that injectable solutions have inherent properties, e.g., sterility, pharmaceutically acceptable excipients and free of harmful measures of pyrogens or similar contaminants.

[0499] The term “solution,” as used herein, means a uniformly dispersed mixture at the molecular or ionic level of one or more substances (solute), in one or more other substances (solvent), typically a liquid.

[0500] The term “suspension,” as used herein, means solid particles that are evenly dispersed in a solvent, which can be aqueous or non-aqueous.

[0501] The term “animal,” as used herein, includes, but is not limited to, humans, canines, felines, equines, bovines, ovines, porcines, amphibians, reptiles, and avians. Representative animals include, but are not limited to a cow, a horse, a sheep, a pig, an ungulate, a chimpanzee, a monkey, a baboon, a chicken, a turkey, a mouse, a rabbit, a rat, a guinea pig, a dog, a cat, and a human. In one embodiment, the animal is a mammal. In one embodiment, the animal is a human. In one embodiment, the animal is a non-human. In one embodiment, the animal is a canine, a feline, an equine, a bovine, an ovine, or a porcine.

[0502] The phrase “drug depot,” as used herein means a precipitate, which includes the multipartite construct, formed within the body of a treated animal that releases the multipartite construct over time to provide a pharmaceutically effective amount of the multipartite construct.

[0503] The phrase “substantially free of,” as used herein, means less than about 2 percent by weight. For example, the phrase “a pharmaceutical composition substantially free of water” means that the amount of water in the pharmaceutical composition is less than about 2 percent by weight of the pharmaceutical composition.

[0504] The term “effective amount,” as used herein, means an amount sufficient to treat or prevent a condition in an animal.

[0505] The nucleotides that make up the multipartite construct can be modified to, for example, improve their stability, i.e., improve their in vivo half-life, and/or to reduce their rate of excretion when administered to an animal. The term “modified” encompasses nucleotides with a covalently modified base and/or sugar. For example, modified nucleotides include nucleotides having sugars which are covalently attached to low molecular weight organic groups other than a hydroxyl group at the 3′ position and other than a phosphate group at the 5′ position. Modified nucleotides may also include 2′ substituted sugars such as 2′-O-methyl-; 2′-O-alkyl; 2′-O-allyl; 2′-S-alkyl; 2′-S-allyl; 2′-fluoro-; 2′-halo or 2′-azido-ribose; carbocyclic sugar analogues; α-anomeric sugars; and epimeric sugars such as arabinose, xyloses or lyxoses, pyranose sugars, furanose sugars, and sedoheptulose.

[0506] Modified nucleotides are known in the art and include, but are not limited to, alkylated purines and/or pyrimidines; acylated purines and/or pyrimidines; or other heterocycles. These classes of pyrimidines and purines are known in the art and include, pseudoisocytosine; N4,N4-ethanocytosine; 8-hydroxy-N6-methyladenine; 4-acetylcytosine, 5-(carboxyhydroxylmethyl) uracil; 5-fluorouracil; 5-bromouracil; 5-carboxymethylaminomethyl-2-thiouracil; 5-carboxymethylaminomethyl uracil; dihydrouracil; inosine; N6-isopentyl-adenine; 1-methyladenine; 1-methylpseudouracil; 1-methylguanine; 2,2-dimethylguanine; 2-methyladenine; 2-methylguanine; 3-methylcytosine; 5-methylcytosine; N6-methyladenine; 7-methylguanine; 5-methylaminomethyl uracil; 5-methoxy amino methyl-2-thiouracil; $3-D-mannosylqueosine; 5-methoxycarbonylmethyluracil; 5-methoxyuracil; 2 methylthio-N6-isopentenyladenine; uracil-5-oxyacetic acid methyl ester; psueouracil; 2-thiocytosine; 5-methyl-2 thiouracil, 2-thiouracil; 4-thiouracil; 5-methyluracil; N-uracil-5-oxyacetic acid methylester; uracil 5-oxyacetic acid; queosine; 2-thiocytosine; 5-propyluracil; 5-propylcytosine; 5-ethyluracil; 5-ethylcytosine; 5-butyluracil; 5-pentyluracil; 5-pentylcytosine; and 2,6,-diaminopurine; methylpsuedouracil; 1-methylguanine; and 1-methylcytosine.

[0507] The multipartite construct can also be modified by replacing one or more phosphodiester linkages with alternative linking groups. Alternative linking groups include, but are not limited to embodiments wherein P(O)O is replaced by P(O)S, P(S)S, P(O)NR2, P(O)R, P(O)OR′, CO, or CH2, wherein each R or R′ is independently H or a substituted or unsubstituted C1-C20 alkyl. A preferred set of R substitutions for the P(O)NR2 group are hydrogen and methoxyethyl. Linking groups are typically attached to each adjacent nucleotide through an —O— bond, but may be modified to include —N— or —S— bonds. Not all linkages in an oligomer need to be identical.

[0508] The multipartite construct can also be modified by conjugating the multipartite construct to a polymer, for example, to reduce the rate of excretion when administered to an animal. For example, the multipartite construct can be “PEGylated,” i.e., conjugated to polyethylene glycol (“PEG”). In one embodiment, the PEG has an average molecular weight ranging from about 20 kD to 80 kD. Methods to conjugate an oligonucleotide with a polymer, such PEG, are well known to those skilled in the art (See, e.g., Greg T. Hermanson, Bioconjugate Techniques, Academic Press, 1966).

[0509] The multipartite constructs of the invention, e.g., such as described above, can be used in the pharmaceutical compositions disclosed herein or known in the art.

[0510] In one embodiment, the pharmaceutical composition further comprises a solvent.

[0511] In one embodiment, the solvent comprises water.

[0512] In one embodiment, the solvent comprises a pharmaceutically acceptable organic solvent. Any useful and pharmaceutically acceptable organic solvents can be used in the compositions of the invention.

[0513] In one embodiment, the pharmaceutical composition is a solution of the salt in the pharmaceutically acceptable organic solvent.

[0514] In one embodiment, the pharmaceutical composition comprises a pharmaceutically acceptable organic solvent and further comprises a phospholipid, a sphingomyelin, or phosphatidyl choline. Without wishing to be bound by theory, it is believed that the phospholipid, sphingomyelin, or phosphatidyl choline facilitates formation of a precipitate when the pharmaceutical composition is injected into water and can also facilitate controlled release of the multipartite construct from the resulting precipitate. Typically, the phospholipid, sphingomyelin, or phosphatidyl choline is present in an amount ranging from greater than 0 to 10 percent by weight of the pharmaceutical composition. In one embodiment, the phospholipid, sphingomyelin, or phosphatidyl choline is present in an amount ranging from about 0.1 to 10 percent by weight of the pharmaceutical composition. In one embodiment, the phospholipid, sphingomyelin, or phosphatidyl choline is present in an amount ranging from about 1 to 7.5 percent by weight of the pharmaceutical composition. In one embodiment, the phospholipid, sphingomyelin, or phosphatidyl choline is present in an amount ranging from about 1.5 to 5 percent by weight of the pharmaceutical composition. In one embodiment, the phospholipid, sphingomyelin, or phosphatidyl choline is present in an amount ranging from about 2 to 4 percent by weight of the pharmaceutical composition.

[0515] The pharmaceutical compositions can optionally comprise one or more additional excipients or additives to provide a dosage form suitable for administration to an animal. When administered to an animal, the multipartite construct containing pharmaceutical compositions are typically administered as a component of a composition that comprises a pharmaceutically acceptable carrier or excipient so as to provide the form for proper administration to the animal. Suitable pharmaceutical excipients are described in Remington's Pharmaceutical Sciences 1447-1676 (Alfonso R. Gennaro ed., 19th ed. 1995), incorporated herein by reference. The pharmaceutical compositions can take the form of solutions, suspensions, emulsion, tablets, pills, pellets, capsules, capsules containing liquids, powders, suppositories, emulsions, aerosols, sprays, suspensions, or any other form suitable for use.

[0516] In one embodiment, the pharmaceutical compositions are formulated for intravenous or parenteral administration. Typically, compositions for intravenous or parenteral administration comprise a suitable sterile solvent, which may be an isotonic aqueous buffer or pharmaceutically acceptable organic solvent. Where necessary, the compositions can also include a solubilizing agent. Compositions for intravenous administration can optionally include a local anesthetic such as lidocaine to lessen pain at the site of the injection. Generally, the ingredients are supplied either separately or mixed together in unit dosage form, for example, as a dry lyophilized powder or water free concentrate in a hermetically sealed container such as an ampoule or sachette indicating the quantity of active agent. Where multipartite construct containing pharmaceutical compositions are to be administered by infusion, they can be dispensed, for example, with an infusion bottle containing, for example, sterile pharmaceutical grade water or saline. Where the pharmaceutical compositions are administered by injection, an ampoule of sterile water for injection, saline, or other solvent such as a pharmaceutically acceptable organic solvent can be provided so that the ingredients can be mixed prior to administration.

[0517] In another embodiment, the pharmaceutical compositions are formulated in accordance with routine procedures as a composition adapted for oral administration. Compositions for oral delivery can be in the form of tablets, lozenges, aqueous or oily suspensions, granules, powders, emulsions, capsules, syrups, or elixirs, for example. Oral compositions can include standard excipients such as mannitol, lactose, starch, magnesium stearate, sodium saccharin, cellulose, and magnesium carbonate. Typically, the excipients are of pharmaceutical grade. Orally administered compositions can also contain one or more agents, for example, sweetening agents such as fructose, aspartame or saccharin; flavoring agents such as peppermint, oil of wintergreen, or cherry; coloring agents; and preserving agents, to provide a pharmaceutically palatable preparation. Moreover, when in tablet or pill form, the compositions can be coated to delay disintegration and absorption in the gastrointestinal tract thereby providing a sustained action over an extended period of time. Selectively permeable membranes surrounding an osmotically active driving compound are also suitable for orally administered compositions. A time-delay material such as glycerol monostearate or glycerol stearate can also be used.

[0518] The pharmaceutical compositions further comprising a solvent can optionally comprise a suitable amount of a pharmaceutically acceptable preservative, if desired, so as to provide additional protection against microbial growth. Examples of preservatives useful in the pharmaceutical compositions of the invention include, but are not limited to, potassium sorbate, methylparaben, propylparaben, benzoic acid and its salts, other esters of parahydroxybenzoic acid such as butylparaben, alcohols such as ethyl or benzyl alcohol, phenolic compounds such as phenol, or quaternary compounds such as benzalkonium chlorides (e.g., benzethonium chloride).

[0519] In one embodiment, the pharmaceutical compositions of the invention optionally contain a suitable amount of a pharmaceutically acceptable polymer. The polymer can increase the viscosity of the pharmaceutical composition. Suitable polymers for use in the compositions and methods of the invention include, but are not limited to, hydroxypropylcellulose, hydoxypropylmethylcellulose (HPMC), chitosan, polyacrylic acid, and polymethacrylic acid.

[0520] Typically, the polymer is present in an amount ranging from greater than 0 to 10 percent by weight of the pharmaceutical composition. In one embodiment, the polymer is present in an amount ranging from about 0.1 to 10 percent by weight of the pharmaceutical composition. In one embodiment, the polymer is present in an amount ranging from about 1 to 7.5 percent by weight of the pharmaceutical composition. In one embodiment, the polymer is present in an amount ranging from about 1.5 to 5 percent by weight of the pharmaceutical composition. In one embodiment, the polymer is present in an amount ranging from about 2 to 4 percent by weight of the pharmaceutical composition. In one embodiment, the pharmaceutical compositions of the invention are substantially free of polymers.

[0521] In one embodiment, any additional components added to the pharmaceutical compositions of the invention are designated as GRAS by the FDA for use or consumption by animals. In one embodiment, any additional components added to the pharmaceutical compositions of the invention are designated as GRAS by the FDA for use or consumption by humans.

[0522] The components of the pharmaceutical composition (the solvents and any other optional components) are preferably biocompatible and non-toxic and, over time, are simply absorbed and/or metabolized by the body.

[0523] As described above, the pharmaceutical compositions of the invention can further comprise a solvent.

[0524] In one embodiment, the solvent comprises water.

[0525] In one embodiment, the solvent comprises a pharmaceutically acceptable organic solvent.

[0526] In an embodiment, the multipartite constructs are available as the salt of a metal cation, for example, as the potassium or sodium salt. These salts, however, may have low solubility in aqueous solvents and/or organic solvents, typically, less than about 25 mg/mL. The pharmaceutical compositions of the invention comprising (i) an amino acid ester or amino acid amide and (ii) a protonated multipartite construct, however, may be significantly more soluble in aqueous solvents and/or organic solvents. Without wishing to be bound by theory, it is believed that the amino acid ester or amino acid amide and the protonated multipartite construct form a salt, such as illustrated above, and the salt is soluble in aqueous and/or organic solvents.

[0527] Similarly, without wishing to be bound by theory, it is believed that the pharmaceutical compositions comprising (i) a multipartite construct; (ii) a divalent metal cation; and (iii) optionally a carboxylate, a phospholipid, a phosphatidyl choline, or a sphingomyelin form a salt, such as illustrated above, and the salt is soluble in aqueous and/or organic solvents.

[0528] In one embodiment, the concentration of the multipartite construct in the solvent is greater than about 2 percent by weight of the pharmaceutical composition. In one embodiment, the concentration of the multipartite construct in the solvent is greater than about 5 percent by weight of the pharmaceutical composition. In one embodiment, the concentration of the multipartite construct in the solvent is greater than about 7.5 percent by weight of the pharmaceutical composition. In one embodiment, the concentration of the multipartite construct in the solvent is greater than about 10 percent by weight of the pharmaceutical composition. In one embodiment, the concentration of the multipartite construct in the solvent is greater than about 12 percent by weight of the pharmaceutical composition. In one embodiment, the concentration of the multipartite construct in the solvent is greater than about 15 percent by weight of the pharmaceutical composition. In one embodiment, the concentration of the multipartite construct in the solvent is ranges from about 2 percent to 5 percent by weight of the pharmaceutical composition. In one embodiment, the concentration of the multipartite construct in the solvent is ranges from about 2 percent to 7.5 percent by weight of the pharmaceutical composition. In one embodiment, the concentration of the multipartite construct in the solvent ranges from about 2 percent to 10 percent by weight of the pharmaceutical composition. In one embodiment, the concentration of the multipartite construct in the solvent is ranges from about 2 percent to 12 percent by weight of the pharmaceutical composition. In one embodiment, the concentration of the multipartite construct in the solvent is ranges from about 2 percent to 15 percent by weight of the pharmaceutical composition. In one embodiment, the concentration of the multipartite construct in the solvent is ranges from about 2 percent to 20 percent by weight of the pharmaceutical composition.

[0529] Any pharmaceutically acceptable organic solvent can be used in the pharmaceutical compositions of the invention. Representative, pharmaceutically acceptable organic solvents include, but are not limited to, pyrrolidone, N-methyl-2-pyrrolidone, polyethylene glycol, propylene glycol (i.e., 1,3-propylene glycol), glycerol formal, isosorbid dimethyl ether, ethanol, dimethyl sulfoxide, tetraglycol, tetrahydrofurfuryl alcohol, triacetin, propylene carbonate, dimethyl acetamide, dimethyl formamide, dimethyl sulfoxide, and combinations thereof.

[0530] In one embodiment, the pharmaceutically acceptable organic solvent is a water soluble solvent. A representative pharmaceutically acceptable water soluble organic solvents is triacetin.

[0531] In one embodiment, the pharmaceutically acceptable organic solvent is a water miscible solvent. Representative pharmaceutically acceptable water miscible organic solvents include, but are not limited to, glycerol formal, polyethylene glycol, and propylene glycol.

[0532] In one embodiment, the pharmaceutically acceptable organic solvent comprises pyrrolidone. In one embodiment, the pharmaceutically acceptable organic solvent is pyrrolidone substantially free of another organic solvent.

[0533] In one embodiment, the pharmaceutically acceptable organic solvent comprises N-methyl-2-pyrrolidone. In one embodiment, the pharmaceutically acceptable organic solvent is N-methyl-2-pyrrolidone substantially free of another organic solvent.

[0534] In one embodiment, the pharmaceutically acceptable organic solvent comprises polyethylene glycol. In one embodiment, the pharmaceutically acceptable organic solvent is polyethylene glycol substantially free of another organic solvent.

[0535] In one embodiment, the pharmaceutically acceptable organic solvent comprises propylene glycol. In one embodiment, the pharmaceutically acceptable organic solvent is propylene glycol substantially free of another organic solvent.

[0536] In one embodiment, the pharmaceutically acceptable organic solvent comprises glycerol formal. In one embodiment, the pharmaceutically acceptable organic solvent is glycerol formal substantially free of another organic solvent.

[0537] In one embodiment, the pharmaceutically acceptable organic solvent comprises isosorbid dimethyl ether. In one embodiment, the pharmaceutically acceptable organic solvent is isosorbid dimethyl ether substantially free of another organic solvent.

[0538] In one embodiment, the pharmaceutically acceptable organic solvent comprises ethanol. In one embodiment, the pharmaceutically acceptable organic solvent is ethanol substantially free of another organic solvent.

[0539] In one embodiment, the pharmaceutically acceptable organic solvent comprises dimethyl sulfoxide. In one embodiment, the pharmaceutically acceptable organic solvent is dimethyl sulfoxide substantially free of another organic solvent.

[0540] In one embodiment, the pharmaceutically acceptable organic solvent comprises tetraglycol. In one embodiment, the pharmaceutically acceptable organic solvent is tetraglycol substantially free of another organic solvent.

[0541] In one embodiment, the pharmaceutically acceptable organic solvent comprises tetrahydrofurfuryl alcohol. In one embodiment, the pharmaceutically acceptable organic solvent is tetrahydrofurfuryl alcohol substantially free of another organic solvent.

[0542] In one embodiment, the pharmaceutically acceptable organic solvent comprises triacetin. In one embodiment, the pharmaceutically acceptable organic solvent is triacetin substantially free of another organic solvent.

[0543] In one embodiment, the pharmaceutically acceptable organic solvent comprises propylene carbonate. In one embodiment, the pharmaceutically acceptable organic solvent is propylene carbonate substantially free of another organic solvent.

[0544] In one embodiment, the pharmaceutically acceptable organic solvent comprises dimethyl acetamide. In one embodiment, the pharmaceutically acceptable organic solvent is dimethyl acetamide substantially free of another organic solvent.

[0545] In one embodiment, the pharmaceutically acceptable organic solvent comprises dimethyl formamide. In one embodiment, the pharmaceutically acceptable organic solvent is dimethyl formamide substantially free of another organic solvent.

[0546] In one embodiment, the pharmaceutically acceptable organic solvent comprises at least two pharmaceutically acceptable organic solvents.

[0547] In one embodiment, the pharmaceutically acceptable organic solvent comprises N-methyl-2-pyrrolidone and glycerol formal. In one embodiment, the pharmaceutically acceptable organic solvent is N-methyl-2-pyrrolidone and glycerol formal. In one embodiment, the ratio of N-methyl-2-pyrrolidone to glycerol formal ranges from about 90:10 to 10:90.

[0548] In one embodiment, the pharmaceutically acceptable organic solvent comprises propylene glycol and glycerol formal. In one embodiment, the pharmaceutically acceptable organic solvent is propylene glycol and glycerol formal. In one embodiment, the ratio of propylene glycol to glycerol formal ranges from about 90:10 to 10:90.

[0549] In one embodiment, the pharmaceutically acceptable organic solvent is a solvent that is recognized as GRAS by the FDA for administration or consumption by animals. In one embodiment, the pharmaceutically acceptable organic solvent is a solvent that is recognized as GRAS by the FDA for administration or consumption by humans.

[0550] In one embodiment, the pharmaceutically acceptable organic solvent is substantially free of water. In one embodiment, the pharmaceutically acceptable organic solvent contains less than about 1 percent by weight of water. In one embodiment, the pharmaceutically acceptable organic solvent contains less about 0.5 percent by weight of water. In one embodiment, the pharmaceutically acceptable organic solvent contains less about 0.2 percent by weight of water. Pharmaceutically acceptable organic solvents that are substantially free of water are advantageous since they are not conducive to bacterial growth. Accordingly, it is typically not necessary to include a preservative in pharmaceutical compositions that are substantially free of water. Another advantage of pharmaceutical compositions that use a pharmaceutically acceptable organic solvent, preferably substantially free of water, as the solvent is that hydrolysis of the multipartite construct is minimized. Typically, the more water present in the solvent the more readily the multipartite construct can be hydrolyzed. Accordingly, multipartite construct containing pharmaceutical compositions that use a pharmaceutically acceptable organic solvent as the solvent can be more stable than multipartite construct containing pharmaceutical compositions that use water as the solvent.

[0551] In one embodiment, comprising a pharmaceutically acceptable organic solvent, the pharmaceutical composition is injectable.

[0552] In one embodiment, the injectable pharmaceutical compositions are of sufficiently low viscosity that they can be easily drawn into a 20 gauge and needle and then easily expelled from the 20 gauge needle. Typically, the viscosity of the injectable pharmaceutical compositions are less than about 1,200 cps. In one embodiment, the viscosity of the injectable pharmaceutical compositions are less than about 1,000 cps. In one embodiment, the viscosity of the injectable pharmaceutical compositions are less than about 800 cps. In one embodiment, the viscosity of the injectable pharmaceutical compositions are less than about 500 cps. Injectable pharmaceutical compositions having a viscosity greater than about 1,200 cps and even greater than about 2,000 cps (for example gels) are also within the scope of the invention provided that the compositions can be expelled through an 18 to 24 gauge needle.

[0553] In one embodiment, comprising a pharmaceutically acceptable organic solvent, the pharmaceutical composition is injectable and does not form a precipitate when injected into water.

[0554] In one embodiment, comprising a pharmaceutically acceptable organic solvent, the pharmaceutical composition is injectable and forms a precipitate when injected into water. Without wishing to be bound by theory, it is believed, for pharmaceutical compositions that comprise a protonated multipartite construct and an amino acid ester or amide, that the α-amino group of the amino acid ester or amino acid amide is protonated by the multipartite construct to form a salt, such as illustrated above, which is soluble in the pharmaceutically acceptable organic solvent but insoluble in water. Similarly, when the pharmaceutical composition comprises (i) a multipartite construct; (ii) a divalent metal cation; and (iii) optionally a carboxylate, a phospholipid, a phosphatidyl choline, or a sphingomyelin, it is believed that the components of the composition form a salt, such as illustrated above, which is soluble in the pharmaceutically acceptable organic solvent but insoluble in water. Accordingly, when the pharmaceutical compositions are injected into an animal, at least a portion of the pharmaceutical composition precipitates at the injection site to provide a drug depot. Without wishing to be bound by theory, it is believed that when the pharmaceutically compositions are injected into an animal, the pharmaceutically acceptable organic solvent diffuses away from the injection site and aqueous bodily fluids diffuse towards the injection site, resulting in an increase in concentration of water at the injection site, that causes at least a portion of the composition to precipitate and form a drug depot. The precipitate can take the form of a solid, a crystal, a gummy mass, or a gel. The precipitate, however, provides a depot of the multipartite construct at the injection site that releases the multipartite construct over time. The components of the pharmaceutical composition, i.e., the amino acid ester or amino acid amide, the pharmaceutically acceptable organic solvent, and any other components are biocompatible and non-toxic and, over time, are simply absorbed and/or metabolized by the body.

[0555] In one embodiment, comprising a pharmaceutically acceptable organic solvent, the pharmaceutical composition is injectable and forms liposomal or micellar structures when injected into water (typically about 500 μL are injected into about 4 mL of water). The formation of liposomal or micellar structures are most often formed when the pharmaceutical composition includes a phospholipid. Without wishing to be bound by theory, it is believed that the multipartite construct in the form of a salt, which can be a salt formed with an amino acid ester or amide or can be a salt with a divalent metal cation and optionally a carboxylate, a phospholipid, a phosphatidyl choline, or a sphingomyelin, that is trapped within the liposomal or micellar structure. Without wishing to be bound by theory, it is believed that when these pharmaceutically compositions are injected into an animal, the liposomal or micellar structures release the multipartite construct over time.

[0556] In one embodiment, the pharmaceutical composition further comprising a pharmaceutically acceptable organic solvent is a suspension of solid particles in the pharmaceutically acceptable organic solvent. Without wishing to be bound by theory, it is believed that the solid particles comprise a salt formed between the amino acid ester or amino acid amide and the protonated multipartite construct wherein the acidic phosphate groups of the multipartite construct protonates the amino group of the amino acid ester or amino acid amide, such as illustrated above, or comprises a salt formed between the multipartite construct; divalent metal cation; and optional carboxylate, phospholipid, phosphatidyl choline, or sphingomyelin, as illustrated above. Pharmaceutical compositions that are suspensions can also form drug depots when injected into an animal.

[0557] By varying the lipophilicity and/or molecular weight of the amino acid ester or amino acid amide it is possible to vary the properties of pharmaceutical compositions that include these components and further comprise an organic solvent. The lipophilicity and/or molecular weight of the amino acid ester or amino acid amide can be varied by varying the amino acid and/or the alcohol (or amine) used to form the amino acid ester (or amino acid amide). For example, the lipophilicity and/or molecular weight of the amino acid ester can be varied by varying the R1 hydrocarbon group of the amino acid ester. Typically, increasing the molecular weight of R1 increase the lipophilicity of the amino acid ester. Similarly, the lipophilicity and/or molecular weight of the amino acid amide can be varied by varying the R3 or R4 groups of the amino acid amide.

[0558] For example, by varying the lipophilicity and/or molecular weight of the amino acid ester or amino acid amide it is possible to vary the solubility of the multipartite construct in water, to vary the solubility of the multipartite construct in the organic solvent, vary the viscosity of the pharmaceutical composition comprising a solvent, and vary the ease at which the pharmaceutical composition can be drawn into a 20 gauge needle and then expelled from the 20 gauge needle.

[0559] Furthermore, by varying the lipophilicity and/or molecular weight of the amino acid ester or amino acid amide (i.e., by varying R1 of the amino acid ester or R3 and R4 of the amino acid amide) it is possible to control whether the pharmaceutical composition that further comprises an organic solvent will form a precipitate when injected into water. Although different multipartite constructs exhibit different solubility and behavior, generally the higher the molecular weight of the amino acid ester or amino acid amide, the more likely it is that the salt of the protonated multipartite construct and the amino acid ester of the amide will form a precipitate when injected into water. Typically, when R1 of the amino acid ester is a hydrocarbon of about C16 or higher the pharmaceutical composition will form a precipitate when injected into water and when R1 of the amino acid ester is a hydrocarbon of about C12 or less the pharmaceutical composition will not form a precipitate when injected into water. Indeed, with amino acid esters wherein R1 is a hydrocarbon of about C12 or less, the salt of the protonated multipartite construct and the amino acid ester is, in many cases, soluble in water. Similarly, with amino acid amides, if the combined number of carbons in R3 and R4 is 16 or more the pharmaceutical composition will typically form a precipitate when injected into water and if the combined number of carbons in R3 and R4 is 12 or less the pharmaceutical composition will not form a precipitate when injected into water. Whether or not a pharmaceutical composition that further comprises a pharmaceutically acceptable organic solvent will form a precipitate when injected into water can readily be determined by injecting about 0.05 mL of the pharmaceutical composition into about 4 mL of water at about 98° F. and determining how much material is retained on a 0.22 μm filter after the composition is mixed with water and filtered. Typically, a formulation or composition is considered to be injectable when no more than 10% of the formulation is retained on the filter. In one embodiment, no more than 5% of the formulation is retained on the filter. In one embodiment, no more than 2% of the formulation is retained on the filter. In one embodiment, no more than 1% of the formulation is retained on the filter.

[0560] Similarly, in pharmaceutical compositions that comprise a protonated multipartite construct and a diester or diamide of aspartic or glutamic acid, it is possible to vary the properties of pharmaceutical compositions by varying the amount and/or lipophilicity and/or molecular weight of the diester or diamide of aspartic or glutamic acid. Similarly, in pharmaceutical compositions that comprise a multipartite construct; a divalent metal cation; and a carboxylate, a phospholipid, a phosphatidyl choline, or a sphingomyelin, it is possible to vary the properties of pharmaceutical compositions by varying the amount and/or lipophilicity and/or molecular weight of the carboxylate, phospholipid, phosphatidyl choline, or sphingomyelin.

[0561] Further, when the pharmaceutical compositions that further comprises an organic solvent form a depot when administered to an animal, it is also possible to vary the rate at which the multipartite construct is released from the drug depot by varying the lipophilicity and/or molecular weight of the amino acid ester or amino acid amide. Generally, the more lipophilic the amino acid ester or amino acid amide, the more slowly the multipartite construct is released from the depot. Similarly, when the pharmaceutical compositions that further comprises an organic solvent and also further comprise a carboxylate, phospholipid, phosphatidyl choline, sphingomyelin, or a diester or diamide of aspartic or glutamic acid and form a depot when administered to an animal, it is possible to vary the rate at which the multipartite construct is released from the drug depot by varying the amount and/or lipophilicity and/or molecular weight of the carboxylate, phospholipid, phosphatidyl choline, sphingomyelin, or the diester or diamide of aspartic or glutamic acid.

[0562] Release rates from a precipitate can be measured injecting about 50 μL of the pharmaceutical composition into about 4 mL of deionized water in a centrifuge tube. The time that the pharmaceutical composition is injected into the water is recorded as T=0. After a specified amount of time, T, the sample is cooled to about −9° C. and spun on a centrifuge at about 13,000 rpm for about 20 min. The resulting supernatant is then analyzed by HPLC to determine the amount of multipartite construct present in the aqueous solution. The amount of multipartite construct in the pellet resulting from the centrifugation can also be determined by collecting the pellet, dissolving the pellet in about 10 μL of methanol, and analyzing the methanol solution by HPLC to determine the amount of multipartite construct in the precipitate. The amount of multipartite construct in the aqueous solution and the amount of multipartite construct in the precipitate are determined by comparing the peak area for the HPLC peak corresponding to the multipartite construct against a standard curve of multipartite construct peak area against concentration of multipartite construct. Suitable HPLC conditions can be readily determined by one of ordinary skill in the art.

### Methods of Treatment

[0563] The pharmaceutical compositions of the invention are useful in human medicine and veterinary medicine. Accordingly, the invention further relates to a method of treating or preventing a condition in an animal comprising administering to the animal an effective amount of the pharmaceutical composition of the invention.

[0564] In one embodiment, the invention relates to methods of treating a condition in an animal comprising administering to an animal in need thereof an effective amount of a pharmaceutical composition of the invention.

[0565] In one embodiment, the invention relates to methods of preventing a condition in an animal comprising administering to an animal in need thereof an effective amount of a pharmaceutical composition of the invention.

[0566] Methods of administration include, but are not limited to, intradermal, intramuscular, intraperitoneal, intravenous, subcutaneous, intranasal, epidural, oral, sublingual, intracerebral, intravaginal, transdermal, rectal, by inhalation, or topical. The mode of administration is left to the discretion of the practitioner. In some embodiments, administration will result in the release of the multipartite construct into the bloodstream.

[0567] In one embodiment, the method of treating or preventing a condition in an animal comprises administering to the animal in need thereof an effective amount of a multipartite construct by parenterally administering the pharmaceutical composition of the invention. In one embodiment, the pharmaceutical compositions are administered by infusion or bolus injection. In one embodiment, the pharmaceutical composition is administered subcutaneously.

[0568] In one embodiment, the method of treating or preventing a condition in an animal comprises administering to the animal in need thereof an effective amount of a multipartite construct by orally administering the pharmaceutical composition of the invention. In one embodiment, the composition is in the form of a capsule or tablet.

[0569] The pharmaceutical compositions can also be administered by any other convenient route, for example, topically, by absorption through epithelial or mucocutaneous linings (e.g., oral, rectal, and intestinal mucosa, etc.).

[0570] The pharmaceutical compositions can be administered systemically or locally.

[0571] The pharmaceutical compositions can be administered together with another biologically active agent.

[0572] In one embodiment, the animal is a mammal.

[0573] In one embodiment the animal is a human.

[0574] In one embodiment, the animal is a non-human animal.

[0575] In one embodiment, the animal is a canine, a feline, an equine, a bovine, an ovine, or a porcine.

[0576] The effective amount administered to the animal depends on a variety of factors including, but not limited to the type of animal being treated, the condition being treated, the severity of the condition, and the specific multipartite construct being administered. A treating physician can determine an effective amount of the pharmaceutical composition to treat a condition in an animal.

[0577] In one embodiment, the multipartite construct comprises an anti-EpCAM aptamer segment. For example, the target of interest comprises EpCAM. In another embodiment, the target is selected from the group of proteins consisting of a EGFR, PBP, EpCAM, and KLK2. In another embodiment, the target is selected from the group of proteins consisting of a tetraspanin, EpCam, CD9, PCSA, CD63, CD81, PSMA, B7H3, PSCA, ICAM, STEAP, KLK2, SSX2, SSX4, PBP, SPDEF, and EGFR. In another embodiment, the target is selected from the group of proteins consisting of CD9, PSMA, PCSA, CD63, CD81, B7H3, IL 6, OPG-13, IL6R, PA2G4, EZH2, RUNX2, SERPINB3, and EpCam. In another embodiment, a target is selected from the group of proteins consisting of A33, a33 n15, AFP, ALA, ALIX, ALP, AnnexinV, APC, ASCA, ASPH (246-260), ASPH (666-680), ASPH (A-10), ASPH (D01P), ASPH (D03), ASPH (G-20), ASPH (H-300), AURKA, AURKB, B7H3, B7H4, BCA-225, BCNP1, BDNF, BRCA, CA125 (MUC16), CA-19-9, C-Bir, CD1.1, CD10, CD174 (Lewis y), CD24, CD44, CD46, CD59 (MEM-43), CD63, CD66e CEA, CD73, CD81, CD9, CDA, CDAC1 1a2, CEA, C-Erb2, C-erbB2, CRMP-2, CRP, CXCL12, CYFRA21-1, DLL4, DR3, EGFR, Epcam, EphA2, EphA2 (H-77), ER, ErbB4, EZH2, FASL, FRT, FRT cf23, GDF15, GPCR, GPR30, Gro-alpha, HAP, HBD 1, HBD2, HER 3 (ErbB3), HSP, HSP70, hVEGFR2, iC3b, IL 6 Unc, IL-1B, IL6 Unc, IL6R, IL8, IL-8, INSIG-2, KLK2, LiCAM, LAMN, LDH, MACC-1, MAPK4, MART-1, MCP-1, M-CSF, MFG-E8, MIC1, MIF, MIS RII, MMG, MMP26, MMP7, MMP9, MS4A1, MUC1, MUC1 seq1, MUC1 seq11A, MUC17, MUC2, Ncam, NGAL, NPGP/NPFF2, OPG, OPN, p53, p53, PA2G4, PBP, PCSA, PDGFRB, PGP9.5, PIM1, PR (B), PRL, PSA, PSMA, PSME3, PTEN, R5-CD9 Tube 1, Reg IV, RUNX2, SCRN1, seprase, SERPINB3, SPARC, SPB, SPDEF, SRVN, STAT 3, STEAP1, TF (FL-295), TFF3, TGM2, TIMP-1, TIMP1, TIMP2, TMEM211, TMPRSS2, TNF-alpha, Trail-R2, Trail-R4, TrKB, TROP2, Tsg 101, TWEAK, UNC93A, VEGF A, and YPSMA-1. In another embodiment, the target is selected from the group of proteins consisting of 5T4, ACTG1, ADAM10, ADAM15, ALDOA, ANXA2, ANXA6, APOA1, ATP1A1, BASP1, C1orf58, C20orf114, C8B, CAPZA1, CAV1, CD151, CD2AP, CD59, CD9, CD9, CFL1, CFP, CHMP4B, CLTC, COTL1, CTNND1, CTSB, CTSZ, CYCS, DPP4, EEF1A1, EHD1, ENO1, F11R, F2, F5, FAM125A, FNBP1L, FOLH1, GAPDH, GLB1, GPX3, HIST1H1C, HISTIH2AB, HSP90AB1, HSPA1B, HSPA8, IGSF8, ITGB1, ITIH3, JUP, LDHA, LDHB, LUM, LYZ, MFGE8, MGAM, MMP9, MYH2, MYL6B, NME1, NME2, PABPC1, PABPC4, PACSIN2, PCBP2, PDCD6IP, PRDX2, PSA, PSMA, PSMA1, PSMA2, PSMA4, PSMA6, PSMA7, PSMB1, PSMB2, PSMB3, PSMB4, PSMB5, PSMB6, PSMB8, PTGFRN, RPS27A, SDCBP, SERINC5, SH3GL1, SLC3A2, SMPDL3B, SNX9, TACSTD1, TCN2, THBS1, TPI1, TSG101, TUBB, VDAC2, VPS37B, YWHAG, YWHAQ, and YWHAZ. In another embodiment, the target is selected from the group of proteins consisting of CD9, CD63, CD81, PSMA, PCSA, B7H3 and EpCam. CD9, CD63, CD81, PSMA, PCSA, B7H3 and EpCam. In another embodiment, the target is selected from the group of proteins consisting of a tetraspanin, CD9, CD63, CD81, CD63, CD9, CD81, CD82, CD37, CD53, Rab-5b, Annexin V, MFG-E8, Muc1, GPCR 110, TMEM211 and CD24 In another embodiment, the target is selected from the group of proteins consisting of A33, AFP, ALIX, ALX4, ANCA, APC, ASCA, AURKA, AURKB, B7H3, BANK1, BCNP1, BDNF, CA-19-9, CCSA-2, CCSA-3&4, CD10, CD24, CD44, CD63, CD66 CEA, CD66e CEA, CD81, CD9, CDA, C-Erb2, CRMP-2, CRP, CRTN, CXCL12, CYFRA21-1, DcR3, DLL4, DR3, EGFR, Epcam, EphA2, FASL, FRT, GAL3, GDF15, GPCR (GPR110), GPR30, GRO-1, HBD 1, HBD2, HNP1-3, IL-1B, IL8, IMP3, LlCAM, LAMN, MACC-1, MGC20553, MCP-1, M-CSF, MIC1, MIF, MMP7, MMP9, MS4A1, MUC1, MUC17, MUC2, Ncam, NGAL, NNMT, OPN, p53, PCSA, PDGFRB, PRL, PSMA, PSME3, Reg IV, SCRN1, Sept-9, SPARC, SPON2, SPR, SRVN, TFF3, TGM2, TIMP-1, TMEM211, TNF-alpha, TPA, TPS, Trail-R2, Trail-R4, TrKB, TROP2, Tsg 101, TWEAK, UNC93A, and VEGFA. In another embodiment, the target is selected from the group of proteins consisting of CD9, EGFR, NGAL, CD81, STEAP, CD24, A33, CD66E, EPHA2, Ferritin, GPR30, GPR110, MMP9, OPN, p53, TMEM211, TROP2, TGM2, TIMP, EGFR, DR3, UNC93A, MUC17, EpCAM, MUC1, MUC2, TSG101, CD63, B7H3, CD24, and a tetraspanin.

[0578] The immunosuppressive target can be a tumor-derived protein found on cMVs and/or cancer cells, including without limitation TGF-β, CD39, CD73, IL10, FasL or TRAIL.

[0579] In one embodiment, the multipartite construct can inhibit angiogenesis. In one embodiment, the multipartite construct can inhibit angiogenesis and the disease being treated is cancer. In one embodiment, the aptamer can inhibit angiogenesis and the disease being treated is a solid tumor. The multipartite construct can be a multipartite construct that inhibits a neoplastic growth or a cancer. In embodiments, the cancer comprises an acute lymphoblastic leukemia; acute myeloid leukemia; adrenocortical carcinoma; AIDS-related cancers; AIDS-related lymphoma; anal cancer; appendix cancer; astrocytomas; atypical teratoid/rhabdoid tumor; basal cell carcinoma; bladder cancer; brain stem glioma; brain tumor (including brain stem glioma, central nervous system atypical teratoid/rhabdoid tumor, central nervous system embryonal tumors, astrocytomas, craniopharyngioma, ependymoblastoma, ependymoma, medulloblastoma, medulloepithelioma, pineal parenchymal tumors of intermediate differentiation, supratentorial primitive neuroectodermal tumors and pineoblastoma); breast cancer; bronchial tumors; Burkitt lymphoma; cancer of unknown primary site; carcinoid tumor; carcinoma of unknown primary site; central nervous system atypical teratoid/rhabdoid tumor; central nervous system embryonal tumors; cervical cancer; childhood cancers; chordoma; chronic lymphocytic leukemia; chronic myelogenous leukemia; chronic myeloproliferative disorders; colon cancer; colorectal cancer; craniopharyngioma; cutaneous T-cell lymphoma; endocrine pancreas islet cell tumors; endometrial cancer; ependymoblastoma; ependymoma; esophageal cancer; esthesioneuroblastoma; Ewing sarcoma; extracranial germ cell tumor; extragonadal germ cell tumor; extrahepatic bile duct cancer; gallbladder cancer; gastric (stomach) cancer; gastrointestinal carcinoid tumor; gastrointestinal stromal cell tumor; gastrointestinal stromal tumor (GIST); gestational trophoblastic tumor; glioma; hairy cell leukemia; head and neck cancer; heart cancer; Hodgkin lymphoma; hypopharyngeal cancer; intraocular melanoma; islet cell tumors; Kaposi sarcoma; kidney cancer; Langerhans cell histiocytosis; laryngeal cancer; lip cancer; liver cancer; malignant fibrous histiocytoma bone cancer; medulloblastoma; medulloepithelioma; melanoma; Merkel cell carcinoma; Merkel cell skin carcinoma; mesothelioma; metastatic squamous neck cancer with occult primary; mouth cancer; multiple endocrine neoplasia syndromes; multiple myeloma; multiple myeloma/plasma cell neoplasm; mycosis fungoides; myelodysplastic syndromes; myeloproliferative neoplasms; nasal cavity cancer; nasopharyngeal cancer; neuroblastoma; Non-Hodgkin lymphoma; nonmelanoma skin cancer; non-small cell lung cancer; oral cancer; oral cavity cancer; oropharyngeal cancer; osteosarcoma; other brain and spinal cord tumors; ovarian cancer; ovarian epithelial cancer; ovarian germ cell tumor; ovarian low malignant potential tumor; pancreatic cancer; papillomatosis; paranasal sinus cancer; parathyroid cancer; pelvic cancer; penile cancer; pharyngeal cancer; pineal parenchymal tumors of intermediate differentiation; pineoblastoma; pituitary tumor; plasma cell neoplasm/multiple myeloma; pleuropulmonary blastoma; primary central nervous system (CNS) lymphoma; primary hepatocellular liver cancer; prostate cancer; rectal cancer; renal cancer; renal cell (kidney) cancer; renal cell cancer; respiratory tract cancer; retinoblastoma; rhabdomyosarcoma; salivary gland cancer; Sézary syndrome; small cell lung cancer; small intestine cancer; soft tissue sarcoma; squamous cell carcinoma; squamous neck cancer; stomach (gastric) cancer; supratentorial primitive neuroectodermal tumors; T-cell lymphoma; testicular cancer; throat cancer; thymic carcinoma; thymoma; thyroid cancer; transitional cell cancer; transitional cell cancer of the renal pelvis and ureter; trophoblastic tumor; ureter cancer; urethral cancer; uterine cancer; uterine sarcoma; vaginal cancer; vulvar cancer; Waldenström macroglobulinemia; or Wilm's tumor. The compositions and methods of the invention can be used to treat these and other cancers.

### Kits

[0580] The invention also provides a kit comprising one or more reagent to carry out the methods of the invention. For example, the one or more reagent can be the one or more aptamer, a buffer, blocker, enzyme, or combination thereof. The one or more reagent may comprise any useful reagents for carrying out the subject methods, including without limitation aptamer libraries, substrates such as microbeads or planar arrays or wells, reagents for biomarker and/or microvesicle isolation (e.g., via chromatography, filtration, ultrafiltration, centrifugation, ultracentrifugation, flow cytometry, affinity capture (e.g., to a planar surface, column or bead), polymer precipitation, and/or using microfluidics), aptamers directed to specific targets, aptamer pools that facilitate detection of a biomarker/microvesicle population, reagents such as primers for nucleic acid sequencing or amplification, arrays for nucleic acid hybridization, detectable labels, solvents or buffers and the like, various linkers, various assay components, blockers, and the like. The one or more reagent may also comprise various compositions provided by the invention. In an embodiment, the one or more reagent comprises one or more aptamer of the invention. The one or more reagent can comprise a substrate, such as a planar substrate, column or bead. The kit can contain instructions to carry out various assays using the one or more reagent.

[0581] In an embodiment, the kit comprises an oligonucleotide probe or composition provided herein. The kit can be configured to carry out the methods provided herein. For example, the kit can include an aptamer of the invention, a substrate, or both an aptamer of the invention and a substrate.

[0582] In an embodiment, the kit is configured to carry out an assay. For example, the kit can contain one or more reagent and instructions for detecting the presence or level of a biological entity in a biological sample. In such cases, the kit can include one or more binding agent to a biological entity of interest. The one or more binding agent can be bound to a substrate.

[0583] In an embodiment, the kit comprises a set of oligonucleotides that provide a particular oligonucleotide profile for a biological sample. An oligonucleotide profile can include, without limitation, a profile that can be used to characterize a particular disease or disorder. For example, the disease or disorder can be a proliferative disease or disorder, including without limitation a cancer. In some embodiments, the cancer comprises a breast cancer.

### EXAMPLES

### Example 1: Identification of DNA Oligonucleotides that Bind a Target

[0584] The target is affixed to a solid substrate, such as a glass slide or a magnetic bead. For a magnetic bead preparation, beads are incubated with a concentration of target protein ranging from 0.1 to 1 mg/ml. The target protein is conjugated to the beads according to a chemistry provided by the particular bead manufacturer. Typically, this involves coupling via an N-hydroxysuccinimide (NHS) functional group process. Unoccupied NHS groups are rendered inactive following conjugation with the target.

[0585] Randomly generated oligonucleotides (oligos) of a certain length, such as 32 base pairs long, are added to a container holding the stabilized target. Each oligo contains 6 thymine nucleotides (a “thymine tail”) at either the 5 or 3 prime end, along with a single molecule of biotin conjugated to the thymine tail. Additional molecules of biotin could be added. Each oligo is also manufactured with a short stretch of nucleotides on each end (5-10 base pairs long) corresponding to amplification primers for PCR (“primer tails”). The sequences are shown absent the thymine tails or primer tails.

[0586] The oligonucleotides are incubated with the target at a specified temperature and time in phosphate-buffered saline (PBS) at 37 degrees Celsius in 500 microliter reaction volume.

[0587] The target/oligo combination is washed 1-10 times with buffer to remove unbound oligo. The number of washes increases with each repetition of the process (as noted below).

[0588] The oligos bound to the target are eluted using a buffer containing a chaotropic agent such as 7 M urea or 1% SDS and collected using the biotin tag. The oligos are amplified using the polymerase chain reaction using primers specific to 5′ and 3′ sequences added to the randomized region of the oligos. The amplified oligos are added to the target again for another round of selection. This process is repeated as desired to observe binding enrichment.

### Example 2: Competitive Assay

[0589] The process is performed as in Example 1 above, except that a known ligand to the target, such as an antibody, is used to elute the bound oligo species (as opposed to or in addition to the chaotropic agent). In this case, anti-EpCAM antibody from Santa Cruz Biotechnology, Inc. was used to elute the aptamers from the target EpCAM.

### Example 3: Screening and Affinity Analysis

[0590] All aptamers generated from the binding assays described above are sequenced using a high-throughput sequencing platform, such as the Ion Torrent from Life Technologies:

[0591] Library Preparation—Aptamers were pooled after ligating barcodes and adapter sequences (Life Technologies) according to manufacturer protocols. In brief, equimolar pools of the aptamers were made using the following steps: Analyzed an aliquot of each library with a Bioanalyzer™ instrument and Agilent DNA 1000 Kit or Agilent High Sensitivity Kit, as appropriate for the final library concentration. The molar concentration (nmol/L) of each amplicon library was determined using the commercially available software (Agilent).

[0592] An equimolar pool of the library was prepared at the highest possible concentration.

[0593] The combined concentration of the pooled library stock was calculated.

[0594] The template dilution factor of the library pool was determined using the following equation: Template Dilution Factor=(Library pool concentration [pM])/26 pM).

[0595] Template Preparation—Using a freshly diluted library, the aptamer pool resulting from binding assays provided above were sequenced using conventional sequencing protocols. High throughput (NextGen) sequencing methods can be used as desired.

[0596] Twenty aptamers were selected based on direct or competitive assays assessing binding to EpCAM (as described above).

[0597] Affinity Measurements—These twenty aptamers were then tested for binding affinity using an in vitro binding platform. SPR can be used for this step, e.g., a Biacore SPR machine using the T200 control software, as follows:

[0598] Dilute the antigen to a concentration of 32 nM.

[0599] Prepare necessary dilutions for kinetics, starting at 32 nM prepare two-fold dilutions of antigen down to 0.5 nM.

[0600] The Biacore 200 control software is programmed with the following conditions: Solution: HBS-EP+ Buffer; Number of cycles: 3; Contact time: 120s; Flow rate: 30 μl/min; Dissociation time: 300s; Solution: Glycine-HCl pH 2.5; Contact time: 120s; Flow rate: 20 μl/min; Stabilization period: 0s. The binding affinities of these aptamers are then measured using the SPR assay above, or an alternate in vitro assay assessing the aptamer for a desired function.

[0601] FIG. 5 shows the SPR data for aptamer BTX176881 (SEQ ID NO: 3). The figure comprises an association and dissociation graph of 1:1 fitting model of the biotinylated aptamers to EpCAM protein at the indicated concentrations (nM). Table 5 shows the calculated K_{d} values from the SPR measurements that are illustrated in FIG. 5. In addition, Table 5 shows the SPR data and calculated K_{d} values for BTX187269 (SEQ ID NO: 6) and Aptamer 4 (SEQ ID NO. 1).

TABLE 5
Calculated K_{D} values from SPR measurements

| Immobilized | | Conc | | K_{d} | Full | Full |
|---|---|---|---|---|---|---|
| aptamer | Analyte | (nM) | Response | (nM) | R² | Chi² |
| BTX176881 | EpCAM | 500 | 0.2434 | 8.40 | 0.989322 | 0.179008 |
| (SEQ ID | protein | 250 | 0.136 | 8.40 | 0.989322 | 0.179008 |
| No: 3) | | 100 | 0.0776 | 8.40 | 0.989322 | 0.179008 |
| BTX187269 | EpCAM | 500 | 0.2575 | 7.12 | 0.990323 | 0.215697 |
| (SEQ ID | protein | 250 | 0.1584 | 7.12 | 0.990323 | 0.215697 |
| NO: 6) | | 100 | 0.0551 | 7.12 | 0.990323 | 0.215697 |
| Aptamer 4 | EpCAM | 500 | 0.2742 | 10.10 | 0.986276 | 0.299279 |
| (SEQ ID | protein | 250 | 0.1618 | 10.10 | 0.986276 | 0.299279 |
| NO. 1) | | 100 | 0.0809 | 10.10 | 0.986276 | 0.299279 |

*K_{d}, R² and Chi² values by Global fitting for single reference method.

### Example 4: Motif Analysis

[0602] The process of Example 3 is followed to identity a high affinity aptamer to a target of interest. Once a high affinity aptamer is identified, its sequence is then analyzed using a software program to estimate its two-dimensional folding structure. Well-known sequence alignment programs and algorithms for motif identification can be used to identify sequence motifs and reduce the dimensionality of even large data sets of sequences. Further, software programs such as Vienna and mfold are well-known to those skilled in the art of aptamer selection and can be used to further group sequences based on secondary structure motifs (shared shapes). See FIG. 3A and FIG. 3B for example structure predictions. Shared secondary structure of course, does not guarantee identical three-dimensional structure. Therefore “wet-lab” validation of aptamers is still useful as no one set of in silico tools has yet been able to fully predict the optimal aptamer among a set of aptamer candidates.

### Example 5: Microvesicle-Based Aptamer Subtraction Assay

[0603] Circulating microvesicles are isolated from normal plasma (e.g., from individuals without cancer) using one of the following methods: 1) Isolation using the ExoQuick reagent according to manufacturer's protocol; 2) Ultracentrifugation comprising spin at 50,000 to 150,000 g for 1 to 20 hours then resuspending the pellet in PBS; 3) Isolation using the TEXIS reagent from Life Technologies according to manufacturer's protocol; and 4) filtration methodology. The filtration method is described in more detail as follows:

[0604] Place syringe and filter (1.2 μm Acrodisc Syringe Filter Versapor Membrane Non-Pyrogenic Ref: 4190, Pall Life Sciences) on open 7 ml 150K MWCO column (Pierce concentrators, 150K MWCO (molecular weight cut off) 7 ml. Part number: 89922). Fill open end of syringe with 5.2 ml of filtered 1×PBS prepared in sterile molecular grade water.

[0605] Pipette patient plasma (900-1000 μl) into the PBS in the syringe, pipette mix twice

[0606] Filter the plasma into the 7 ml 150K MWCO column.

[0607] Centrifuge 7 ml 150K MWCO columns at 2000×g at 20° C. (16° C. to 24° C.) for 1 hour.

[0608] After 1 hour spin, pour the flow-through into 10% bleach to be discarded.

[0609] Visually inspect sample volume. If plasma concentrate is above the 8.5 ml graduation on the concentrator tube, continue to spin plasma sample at 10 minute increments at 2000×g at 20° C. (16° C. to 24° C.) checking volume after each spin until plasma concentrate is between 8.0 and 8.5 mls.

[0610] Pipette mix slowly on the column a minimum of 6 times and adjust pipette to determine plasma concentrate volume. If volume is between 100 μl and Target Volume, transfer plasma concentrate to previously labeled co-polymer 1.5 ml tube. If volume is still greater than Target Volume, repeat the above centrifugation step.

[0611] Pour ˜45 mls of filtered 1×PBS prepared in sterile molecular grade water into 50 ml conical tube for use in the next step.

[0612] Add the appropriate amount of filtered 1×PBS to reconstitute the sample to the Target Volume.

[0613] The microvesicles produced using any of the isolation methods will comprise a mixture of vesicle types and will be various sizes with the possible exception of ultracentrifugation methods, which may favor isolating exosome size particles.

[0614] Randomly generated oligonucleotides (produced as described in Example 1 above) are incubated with the isolated normal vesicles in PBS overnight at room temperature or at 4 degrees Celsius.

[0615] The aptamers that do not bind to these vesicles are isolated by spinning down the vesicles at 50,000 to 150,000×g for 1 to 20 hours and collecting the supernatant.

[0616] The aptamer oligonucleotides are collected from the supernatant by running the mixture over a column containing streptavidin-coated beads. These aptamers are then added to vesicles isolated from diseased patients (using the same methods as above) and incubated overnight in PBS at room temperature or 4 degrees Celsius.

[0617] The vesicles are then spun at 50,000 to 150,000×g for 1 to 20 hours and the supernatant is discarded. The vesicles are resuspended in PBS and lysed using SDS or some similar detergent.

[0618] The aptamers are then captured by running the lysis mixture over a column of streptavidin-coated beads. The isolated aptamers are then subjected to a round of PCR to amplify the products.

[0619] The process is then repeated for a set number of times, e.g., 5 times. The remaining aptamer pool has been depleted of aptamers that recognize microvesicles found in “normal” plasma. Accordingly, this method can be used to enrich the pool in aptamers that recognize cancer vesicles. See FIG. 4.

### Example 6: Detection of Microvesicles Using Anti-EpCAM Aptamers

[0620] Aptamers can be used as binding agents to detect a biomarker. In this Example, aptamers are used as binding agents to detect EpCAM protein associated with microvesicles.

[0621] FIGS. 6A-D illustrate the use of an anti-EpCAM aptamer (Aptamer 4; SEQ ID NO. 1) to detect a microvesicle population in plasma samples. Plasma samples were obtained from three men with prostate cancer and three men without prostate cancer (referred to as controls or normals). Antibodies to the following microvesicle surface protein antigens of interest were conjugated to microbeads (Luminex Corp, Austin, TX): FIG. 6A) EGFR (epidermal growth factor receptor); FIG. 6B) PBP (prostatic binding protein; also known as PEBP1 (phosphatidylethanolamine binding protein 1)); FIG. 6C) EpCAM (epithelial cell adhesion molecule); and FIG. 6D) KLK2 (kallikrein-related peptidase 2). Microvesicles in the plasma samples were captured using the bead-conjugated antibodies. Fluorescently labeled Aptamer 4 was used as a detector in the microbead assay. FIGS. 6A-D show the average median fluorescence values (MFI values) detected for the bead-captured and Aptamer 4 detected microvesicles. Each plot individually shows the three cancer (C1-C3) and three normal samples (N1-N3). These data show that, on average, the prostate cancer samples have higher levels of microvesicles containing the target proteins than the normals.

### Example 7: Negative and Positive Selection of Aptamers

[0622] Aptamers can be used in various biological assays, including numerous types of assays which rely on a binding agent. For example, aptamers can be used instead of antibodies in immune-based assays. This Example provides an aptamer screening method that identifies aptamers that do not bind to any surfaces (substrates, tubes, filters, beads, other antigens, etc.) throughout the assay steps and bind specifically to an antigen of interest. The assay relies on negative selection to remove aptamers that bind non-target antigen components of the final assay. The negative selection is followed by positive selection to identify aptamers that bind the desired antigen.

[0623] Preliminary experiments were done with five DNA aptamer libraries with 10¹⁵ sequences each and variable lengths (60, 65, 70, 75, 80-mers) were pre-amplified and strand separated so that forward strand (non-biotinylated) serves as an aptamer. Multiple rounds of negative selection and positive selection were performed. Before each round, the recovered aptamer products were PCR amplified and strand separated using standard methodology. Selections were performed as follows:

### Negative Selection

[0624] 1. Prepare bead negative Selection Mix: Incubate 1200 non-magnetic beads with standard blocking agent for 20 min.
[0625] 2. Add 50 μl of aptamer library (5 libraries total) to a PCR strip tube with 4.5 μl of each bead mixture. Incubate for 2 h at 37° C. with agitation at 550 rpm.
[0626] 3. Pre-wet filter plate (1.2 μm, Millipore) with PBS-BN buffer. Add 150 μl PBS-BN.
[0627] 4. Transfer samples from the PCR strip tubes to the filter plate, incubate for 1 h at room temperature with agitation at 550 rpm.
[0628] 5. Collect flow-through from filter plate into a collection (NBS) plate using a vacuum manifold.
[0629] 6. Concentrate and clean samples to remove excess materials as desired.

[0630] The negative selection process is repeated up to 6-7 times.

### Positive Selection

[0631] Before starting, conjugate the protein biomarkers of interest (here, SSX4, SSX2, PBP, KLK2, SPDEF) to desired non-magnetic microbeads using conditions known in the art. The recombinant purified starting material included: SPDEF recombinant protein from Novus Biologicals (Littleton, CO, USA), catalog number H00025803-P01; KLK2 recombinant protein from Novus, catalog number H00003817-P02; SSX2 recombinant protein from Novus, catalog number H00006757-P01; PBP recombinant protein from Fitzgerald Industries International (Action, MA, USA), catalog number 30R-1382; SSX4 recombinant protein from GenWay Biotech, Inc. (San Diego, CA, USA), catalog number GWB-E219AC.
[0632] 1. Bead blocking: Incubate a desired number of each bead (8400×number of aptamer libraries (5)×an overage factor of (1.2)) with a starting block for 20 min.
[0633] 2. Mix 50 μl of each aptamer library sample to PCR strip tubes add 2.3 μl of bead sample with particular antigen. Incubate for 2 h at 37° C. with agitation at 550 rpm.
[0634] 3. Pre-wet filter plate (1.2 μm, Millipore) with PBS-BN buffer. Add 150 μl PBS-BN.
[0635] 4. Transfer samples from the PCR strip tubes to the filter plate, incubate for 1 h at room temperature with agitation at 550 rpm.
[0636] 5. Wash 3× with PBS-BN, add 50 μl of PBS and collect samples from the top of the filter to the 1.5 ml tubes.

[0637] The positive selection is repeated up to 16 times. Certain rounds of positive selection have additional steps to treat the recovered RNA (i.e., remaining aptamer candidates) as follows:

[0638] Round 8 of positive selection was modified as follows:
[0639] 1. After the third wash (PBS-BN) 25 μl of sample were collected from the top of the filter into 1.5 ml tubes.
[0640] 2. The filter plate was incubated at 45° C. for ˜10 min and washed immediately using vacuum. The plate was washed three more times with PBS-BN.
[0641] 3. 50 μl of PBS were added to the plate and step 2 was repeated.
[0642] 4. After the last wash, 25 μl of PBS was added to the wells. The samples were mixed well and collected from the top of the filter into 1.5 ml tubes.

[0643] Round 9 of positive selection was modified as follows:
[0644] 1. After the final wash in step 5), 5 μg/ml Streptavidin-PE was added to the aptamer mixture and incubated for 30 min at room temperature with agitation at 550 rpm.
[0645] 2. Samples on filter plate were washed 3× with PBS-BN (+additional 500 mM NaCl).
[0646] 3. One additional wash with regular PBS-BN was performed.
[0647] 4. 50 μl of PBS was added to the samples followed by collection as above into 1.5 ml tubes.
[0648] 5. Samples stored at −20° C.

[0649] Round 14 of positive selection was modified as follows:

[0650] Before start this round, the antigens of interest (SSX4, SSX2, PBP, KLK2, SPDEF) were conjugated to carboxylated magnetic beads using methods known in the art.
[0651] 1. Bead blocking: take desired number of each non-magnetic bead (3000×number of aptamer libraries (5)×an overage factor of 1.2), add starting block (3:1, blocking per 1200 beads), make 5 mixes of 4 antigens and supplement each with different target antigen conjugated to magnetic beads (see Table 6 below, wherein the antigens are conjugated to non-magnetic beads except as indicated), incubate 20 min.

TABLE 6
Bead blocking mixtures

| Blocking | | Magnetic bead |
|---|---|---|
| Mix | Non-magnetic bead antigens | antigens |
| 1 | SSX4 + PBP + KLK2 + SPDEF | SSX2 |
| 2 | SSX2 + PBP + KLK2 + SPDEF | SSX4 |
| 3 | SSX2 + SSX4 + KLK2 + SPDEF | PBP |
| 4 | SSX2 + SSX4 + PBP + SPDEF | KLK2 |
| 5 | SSX2 + SSX4 + PBP + KLK2 | SPDEF |

[0652] 2. Add 50 μl of aptamer libraries to PCR strip tubes, add bead mixtures with target antigen on magnetic beads to the tubes with pre-selected corresponding aptamer library and incubate for 2 h at 37° C. with agitation at 550 rpm.
[0653] 3. Pre-wet filter plate with PBS-BN buffer, add 150 μl PBS-BN.
[0654] 4. Transfer samples from PCR strip tubes to filter plate, incubate 1 h room temperature with agitation at 550 rpm.
[0655] 5. After last (standard) wash, add 5 μg/ml Streptavidin-PE, incubate for 30 min room temperature with agitation at 550 rpm;
[0656] 6. Wash 3× with PBS-BN (+additional 500 mM NaCl).
[0657] 7. Perform one additional wash with regular PBS-BN.
[0658] 8. 50 μl of PBS was added to the samples followed by collection as above into 1.5 ml tubes.
[0659] 9. Remove the magnetic beads using a magnetic stand, and replace with fresh PBS buffer.
[0660] 10. Samples stored at −20° C. for subsequent DNA extraction and strand separation.

[0661] Optional steps implemented in the later round of positive selection are intended to increase stringency of aptamer binding (e.g., increased heat or salt concentration).

### Example 8: Discovery and Characterization of Anti-EpCAM Aptamers

[0662] In this Example, an aptamer to EpCAM identified using the technique in the Example above is characterized. After selection for a pool of EpCAM binding aptamers as described above, the aptamer library was sequenced using the Ion Torrent standard protocol (Life Technologies, Carlsbad, CA). Lead candidates were selected as those having (a) high abundant motifs across all read sequences with full expected length product and (b) strong secondary structure (FIG. 7B).

[0663] Aptamers were selected for EPCAM protein conjugated to MicroPlex beads in competition with SSX4, SSX2, PBP, KLK2, and SPDEF recombinant proteins. A portion of the aptamers was selected in initial rounds against EpCAM that was attached to an Fe tag, and after round 8 the selection was switched to EPCAM with a Histidine tag. Another portion of the aptamers was selected in initial rounds against EpCAM that was attached to a Histidine tag, and after round 8 the selection was switched to EPCAM with an Fe tag. Methods of using Fe and histidine tags for protein purification and capture are known to those of skill in the art.

### Aptamer Characterization

[0664] CAR003 is an aptamer candidate identified using the above methodology. As an RNA aptamer, CAR003 with alternate tail sequence has the following RNA sequence (SEQ ID NO. 5):

5′-auccagagug acgcagcagu cuuuucugau ggacacgugg
uggucuagua ucacuaagcc accgugucca-3′

[0665] CAR003 was further characterized. EpCAM aptamer CAR003 is modified as desired by attachment of a biotin moiety on the 5′end or 3′ end. The biotin can be used to bind the aptamer using a streptavidin-biotin system, e.g., for labeling, capture and/or anchoring. FIG. 7B illustrates the optimal secondary structure of CAR003 with a minimum free energy (AG) of −30.00 kcal/mol. For purposes of illustration, the aptamer is shown as an RNA aptamer (SEQ ID NO. 5) corresponding to the CAR003 DNA sequence (SEQ ID NO. 4).

[0666] Synthesis and purification. The selected CAR003 aptamer was re-synthesized using AKTA OligoPilot 100 Synthesizer (GE Healthcare Life Sciences Corp., Piscataway, NJ) with a 3′Biotin and final detritylation. The product was purified with anion exchange chromatography by FPLC. Several fractions after FPLC were combined as shown as the indicated Pools 1-3 in FIG. 7C. The figure comprises an FPLC chromatogram with all product and fractions assigned in pools after checking quality on gel. FIG. 7D illustrates a SYBR GOLD stained gel with different FPLC fractions of CAR003 aptamer after synthesis. Different fractions were combined in pools based on amount of unfinished chains in order high to low (pool 1-pool 3). The pools 1-3 correspond to those indicated in FIG. 7C.

[0667] CAR003 aptamer characterization. Purified CAR003 aptamer was tested for binding to recombinant EPCAM protein with a polyhistidine tag (“His tagged”) using the following internally developed assay. Anti-His tag conjugated beads were mixed with EPCAM-His tagged protein. The aptamer to be tested was labeled with streptavidin-phycoerythrin (SA-PE). The EpCAM-beads and SA-PE labeled aptamers were mixed. Binding was determined as median fluorescent value in a bead assay as described herein. MFI values (FIG. 7E-F) increase with increased binding of the SA-PE labeled aptamer to the recombinant EpCAM. FIG. 7E-F illustrate binding of CAR003 to EPCAM protein in 25 mM HEPES with PBS-BN (PBS, 1% BSA, 0.05% Azide, pH 7.4) (FIG. 7E) or in 25 mM HEPES with 1 mM MgCl₂ (FIG. 7F). EPCAM aptamer Aptamer 4 (see above) was used for comparison. As shown in the figures, CAR003 pool 3 more efficiently binds its target in the presence of MgCl₂(FIG. 7F) than in the presence of BSA (FIG. 7E).

[0668] To understand its performance further, CAR003 binding was tested in the presence of both BSA and MgCl₂ in various buffers. FIG. 7G illustrates CAR003 binding to EpCAM in the indicated salts with and without addition of bovine serum albumin (BSA). Again, CAR003 binding to EpCAM is more efficient when BSA is not present. Additionally, 150 mM NaCl was tested but did not appear to improve CAR003 performance over MgCl₂.

[0669] Another factor which might influence performance of aptamer is denaturing with different salt compositions. FIG. 7H illustrates the effect of denaturing on CAR003 binding to EPCAM protein. As seen from the chart, denaturing of the aptamer has a positive effect on CAR003 binding to EpCAM similar as the effect on CAR003 from MgCl₂. However, denaturing in the presence of MgCl₂ may not synergistically improve binding of CAR003 to EpCAM. Interestingly, CAR003 appeared more stable compared to control Aptamer 4 in the conditions tested.

[0670] CAR003 affinity to EpCAM in the bead assay environment was assessed in the same assay as above with aptamer titrated across a constant input of antigen. FIG. 7I illustrates titration of aptamers against EPCAM recombinant protein (constant input 5 μg). Under the conditions tested, Aptamer 4 had a higher affinity to EPCAM protein compared to CAR003 as suggested from saturation level starting at 5 μg of aptamer input.

[0671] In order to evaluate specificity of CAR003, it was tested using Western Blot against EPCAM recombinant protein, and controls comprising bovine serum albumin (BSA) and human serum albumin (HSA). FIG. 7J illustrates a Western blot with CAR003 aptamer versus EPCAM his-tagged protein, BSA, and HSA (5 μg each). The gel was blocked 0.5% F127 and probed with ˜50 μg/ml CAR003 biotinylated aptamer, fraction 3. The blot was visualized with NeutrAvidin-HRP followed by SuperSignal West Femto Chemiluminescent Substrate. The Western blot probed with CAR003 aptamer showed a clear preference of the aptamer to EPCAM protein over the albumins.

[0672] CAR003 test with plasma samples. Plasma samples from five prostate cancer and five normal subjects were tested with CAR003 to detect microvesicles using bead-conjugated proteins to capture the microvesicles and SA-PE labeled aptamer to detect the vesicles. SA-PE labeled Aptamer 4 detector was used as control. Fold changes of Cancer over Normal are shown in Table 7. The fold changes are shown without normalization (“Raw”) or with normalization to a negative control. The vesicles were captured with bead conjugated antibodies to SSX4, PBP, SPDEF, EPCAM, KLK2 and SSX2 as indicated.

TABLE 7
CAR003 to detect microvesicles

| | | SSX4 | PBP | SPDEF | EPCAM | KLK2 | SSX2 |
|---|---|---|---|---|---|---|---|
| Raw | Standard protocol | 0.87 | 0.39 | 0.71 | 0.63 | 0.93 | 0.87 |
| | Incubation in | 0.77 | 0.39 | 0.69 | 0.6 | 0.91 | 0.81 |
| | presence of 1 mM | | | | | | |
| | MgCl2 and absence | | | | | | |
| | of PBS-BN | | | | | | |
| | Aptamer 4 control | 0.78 | 0.67 | 0.81 | 0.72 | 1.19 | 0.79 |
| | (standard protocol) | | | | | | |
| Normalized | Standard protocol | 1.49 | 0.84 | 1.13 | 1.17 | 1.5 | 1.38 |
| to Negative | Incubation in | 1.27 | 0.83 | 1.08 | 1.1 | 1.46 | 1.29 |
| control | presence of 1 mM | | | | | | |
| | MgCl2 and absence | | | | | | |
| | of PBS-BN | | | | | | |
| | Aptamer 4 control | 1.18 | 0.96 | 1.11 | 1.04 | 1.82 | 1.1 |
| | (standard protocol) | | | | | | |

[0673] Under the conditions tested, the samples detected with CAR003 had lower MFI values as compared to detection with Aptamer 4, whereas CAR003 had a better signal-to-noise ratio and showed better separation between cancer and normal samples with SSX4, SPDEF, EPCAM and SSX2 capturing markers.

### Control Aptamer

[0674] The characteristics of the aptamers (size, stability, binding affinity and specificity, etc) can be compared against control aptamers specific to EpCAM or other targets. For example, the aptamers are compared to the anti-VEGF aptamer 5′ biotin-CA ATT GGG CCC GTC CGT ATG GTG GGT (SEQ ID NO. 7) as described in Kaur and Yung, 2012.

### REFERENCES

[0675] 1) Müller, J., et al. “Selection of high affinity DNA-aptamer for activated protein C using capillary electrophoresis.” Research in Pharmaceutical Sciences 7.5 (2012): S987.
[0676] 2) Cerchia, L., and V. de Franciscis. “Nucleic Acid Aptamers Against Protein Kinases.” Current medicinal chemistry 18.27 (2011): 4152-4158.
[0677] 3) Wu, Jie, et al. “Identification, Characterization and Application of a G-Quadruplex Structured DNA Aptamer against Cancer Biomarker Protein Anterior Gradient Homolog 2.” PloS ONE 7.9 (2012): e46393
[0678] 4) Mitkevich, Olga V., et al. “DNA aptamers detecting generic amyloid epitopes.” Prion 6.4 (2012): 400-406.
[0679] 5) Kaur H, Yung L-YL (2012) Probing High Affinity Sequences of DNA Aptamer against VEGF₁₆₅. PLoS ONE 7(2): e31196. doi:10.1371/journal.pone.0031196.

### Example 9: Aptamer Target Identification

[0680] In this Example, aptamers conjugated to microspheres are used to assist in determining the target of two aptamers identified by library screening methods as described above. The general approach is shown in FIG. 9. The approach is used to verify the targets of CAR003, an aptamer identified by library screening to recognize EpCAM. See description above for CAR003. In this approach, the sequence of CAR003 is randomly rearranged before linkage to the microspheres. The microspheres are used as controls to bind to targets that are similar but not identical to the intended target molecule.

[0681] The protocol used is as follows:
[0682] 1) The candidate aptamers (here, CAR003) and negative control aptamers (here, randomly arranged CAR003) are synthesized with modifications to allow capture (here, the aptamers are biotinylated) and crosslinking (here, using the Sulfo-SBED Biotin Label Transfer Reagent and Kit, Catalog Number 33073 from Thermo Fisher Scientific Inc., Rockford, IL, to allow photocrosslinking).
[0683] 2) Each of the aptamers is individually mixed with microvesicles having the target of interest (here, BrCa cell line microvesicles).
[0684] 3) After incubation to allow the aptamers to bind target, ultraviolet light is applied to the mixtures to trigger crosslinking of the aptamers with the microvesicle targets.
[0685] 4) The microvesicles are lysed, thereby releasing the crosslinked aptamer-target complex into solution.
[0686] 5) The crosslinked aptamer-target complexes are captured from solution using a streptavidin coated substrate.
[0687] 6) The crosslinked aptamer-target complexes for each aptamer are run individually on SDS-PAGE gel electrophoresis. The captured protein targets are visualized with Coomasie Blue staining.
[0688] 7) The crosslinking and binding steps may be promiscuous so that multiple bands including the intended target but also random proteins will appear on each of the gels. The intended target will be found in a band that appears on the gel with the candidate aptamer (here, CAR003) but not the related negative control aptamers (here, randomly arranged CAR003). The bands corresponding to the target are excised from the gel.
[0689] 8) Mass spectrometry (MS) is used to identify the aptamer target from the excised bands.

### Example 10: Aptamers to Breast Cancer (BrCα) Derived Microvesicles

[0690] In this Example, an aptamer library is screened to identify aptamers that distinguish between microvesicles circulating in the blood of breast cancer patients and microvesicles circulating in the blood of healthy, control individuals (i.e., without breast cancer).

[0691] Microvesicles were isolated from plasma of a pool of 60 breast cancer patients (BrCα+). Microvesicles were also isolated from pool of 60 non-cancer samples (BrCα−). Microvesicles were isolated from the plasma using ultracentrifugation (120,000×g). Microvesicles were in the pellet from the ultracentrifugation. The supernatant from the ultracentrifugation was saved to use as a control. The microvesicles from both sample types were conjugated to MagPlex beads (Luminex Corp, Austin TX). Optionally, the isolated microvesicles are incubated with anti-HSA/IgG/Fibrinogen beads to remove these highly abundant blood proteins. However, the conjugation step can be optimized to favor conjugation of the microvesicles such that removal of highly abundant proteins may be less of an issue.

[0692] The aptamer library used consisted of a 2′F SUL1 RNA aptamer library. The sequence is 5′-GGGAGGACGAUGCGG-N40-CAGACGACUCGCUGAGGAUCCGAGA-3′ (SEQ ID NO. 8). The aptamer library consists of three sections: Forward primer—15 nucleotides, variable region—40 nucleotides; reverse primer—25 nucleotides. All pyrimidines (C and U) were 2′Fluoro modified.

[0693] The aptamer library was incubated with either the cancer or control microvesicle-conjugated beads. Thirteen rounds of positive selection for aptamers that bind the microvesicles were performed in parallel for both types of samples. See Example 11 below for detailed protocol of the positive selection steps. Negative selection was not performed.

[0694] A number of representative sequences obtained from these procedures are shown in Table 8. The sequences in the table were identified in the aptamer pools from selection against BrCa microvesicles but were not in the aptamer pools selected against non-cancer samples. In Table 8, the sequences are shown 5′ to 3′ from left to right, wherein each complete sequence consists of a 5′ leader sequence 5′-GGGAGGACGAUGCGG (SEQ ID NO. 9) followed by the indicated Variable Sequence followed by the 3′ tail sequence 5′-CAGACGACUCGCUGAGGAUCCGAGA (SEQ ID NO. 10). Each sequence is derived from a library having a leader and tail (see description above) with a variable sequence between. It is understood that the nucleotide sequences that are disclosed in Table 8 can also be modified to the extent that resulting modifications result in an aptamer having about 50, 55, 60, 65, 70, 75, 80, 85, 90, 95, 96, 97, 98, and 99 percent homology to the disclosed sequence and retain the functionality of binding to microvesicle antigens or functional fragments thereof.

TABLE 8
BrCa microvesicle aptamer
candidate sequences

| | SEQ | |
|---|---|---|
| | ID | |
| ID | NO. | Variable Sequence |
| BRCA_APT1_RNA | 11 | CGCGUCUUCCCCGCAUUGCCGCAAUU |
| | | GCCAUACAUUAAUA |
| BRCA_APT2_RNA | 13 | GUCCGGAACGCCUCGAUCCUCGCAUA |
| | | AUAUGAUACGUCUG |
| BRCA_APT3_RNA | 15 | GUCCAUGGUACGCCUCGAUUCCGCCC |
| | | AUACAUGCAUGUAA |
| BRCA_APT4_RNA | 17 | CACUAUCCGUUUGUCCGUCCUCUUGU |
| | | GGUAUUGCGCAUGC |
| BRCA_APT5_RNA | 19 | UCUUCCAUCUGGUCGCGAUACAGAAU |
| | | ACGAUUAACAUAAA |
| BRCA_APT6_RNA | 21 | GAUCACGCUGCCCUUUGUUUAAGGCC |
| | | UUUAUACAAACGCA |
| BRCA_APT7_RNA | 23 | UAUUCGCCAGUCACAUCAACUAUGAU |
| | | GACGCUUGACUGGA |

[0695] Each sequence in Table 8 is synthesized in two variants for further investigation: 5′ biotinylated and 3′ biotinylated. This provides aptamer variants that can be captured at the 5′ end or the 3′ end as desired. The aptamers are further synthesized with each pyrimidine (C and U) 2′Fluoro modified.

[0696] The DNA sequence corresponding to each RNA sequence in Table 8 is provided in the sequence listing, where the DNA sequence directly follows its corresponding RNA sequence. For example SEQ ID NO. 12 is the DNA sequence corresponding to RNA sequence SEQ ID NO. 11, etc. The DNA forms of the aptamers are synthesized for further characterization as well.

[0697] The aptamers above were identified using positive selection for aptamers which recognize BrCa and non-BrCa microvesicles conjugated to microspheres.

### Example 11: Aptamer Library Selection Protocol

[0698] This Example provides the protocol for SUL1 RNA library selection performed in the Example above. The protocol can be followed for other aptamer libraries and sample input as desired.

[0699] Preparation

[0700] The working space is cleaned with 80% EtOH before working.

[0701] Beads are MagPlex beads (Luminex Corp., Austin, TX). Other beads can be substituted as desired.

[0702] Buffers/Reagents to Prepare:
[0703] MilliQ water
[0704] 100 mM MgCl₂
[0705] 5× Transcription Buffer (200 mM Tris pH 7.9)
[0706] 1×PBS
[0707] 1×PBS with 3 mM MgCl₂
[0708] 10×PBS
[0709] Selection buffer (lx PBS with 0.1% BSA and 3 mM MgCl₂)

[0710] Before starting with selection, remove the bead storage buffer, and wash beads with 1×PBS w/3 mM MgCl₂ 1 times (200 uL total in all 4 tubes). 200,000 beads per selection are used.

### Binding 2′F SUL1 RNA Pool to Microvesicle Coated Magnetic Beads

[0711] Abbreviations: TK—Transcription; NTC—No template control.

### Steps:

[0712] 1. 1^{st} Round: Mix 1 nmol purified 2′F SUL1 RNA with 20 μl of resuspended beads (conjugated with microvesicle). 10 uL of 10×PBS+1% BSA, 3 μl 100 mM MgCl₂, and 47 uL H₂O. This gives a final concentration of 1×PBS, 0.1% BSA, 3 mM MgCl₂.
   [0713] 1.1 The addition of MgCl₂ in this step gives a concentration of 3 mM MgCl₂. This is the binding concentration for the entire process.
   [0714] 1.2 Following Rounds: Mix 20 μl of transcription product (15 mM MgCl₂ inside) with 20 μl of washed microvesicle coated beads, plus 9 uL 10×PBS with 1% BSA, 51 uL H₂O. No additional MgCl₂ is needed because the MgCl₂ in the diluted transcription product (TK) provides a final concentration of 3 mM MgCl₂.
[0715] 2. Incubate for 30 min at 37° C., shake at 1000 rpm, and pipet mix every 10 minutes.
[0716] 3. Wash the beads:
   [0717] 3.1 One washing cycle comprises:
      [0718] 3.1.1 Remove the beads from the magnet
      [0719] 3.1.2 Resuspend beads in 100 μl 1×PBS+3 mM MgCl₂ off the magnet.
      [0720] 3.1.3 Incubate sample for 30 seconds off of the magnet.
      [0721] 3.1.4 Place the sample back onto the magnet, and wait until the beads are on the side.
      [0722] 3.1.5 Remove and discard the supernatant.
      [0723] 3.1.6 Resuspend in 100 μl 1×PBS+3 mM MgCl₂+0.1% BSA off of the magnet.
      [0724] 3.1.7 Incubate sample for 3 minutes off of the magnet.
      [0725] 3.1.8 Place the sample back onto the magnet, and wait until the beads are on the side.
      [0726] 3.1.9 Remove and discard the supernatant
   [0727] 3.2 1^{st} Round: Place bead mixture on a magnet and remove the supernatant. Wash once with 100 μl 1×PBS+3 mM MgCl₂+0.1% BSA (by pipette mixing the beads), and discard buffer.
   [0728] 3.3 Following Rounds: Increase the washing steps every second round by one more washing step up to 3 washing steps.
[0729] 4. Add 55 μl MilliQ water to the bead sample.
[0730] 5. Elute the RNA by incubating the bead sample for 5 min at 80° C.
   [0731] 5.1 Check if there is 50 μl, if not spin the sample down to spin down the condensed water off the top.
   [0732] 5.2 Transfer the supernatant to a new vial. Work quickly to avoid the strands rebinding the beads.
      [0733] 5.2.1 Use 50 μl eluate for the following RT-PCR and store the rest at −20° C.

### RT-PCR of Recovered Aptamer Candidates

### Tips

[0734] The rest of the RT-PCR sample and the TK-PCR sample is stored at −20° C.
[0735] RNA can be stored at 4° C. for ˜1 h
[0736] RT-PCR product can be stored overnight at 4° C.
[0737] Proceed to the next selection cycle for optimal RNA quality immediately after transcription.
[0738] Avoid vortexing RNA
[0739] Mix on ice
[0740] Use 0.5 ml PCR tubes
[0741] Every RT-PCR should have a no-template control (NTC) with water instead of template
[0742] Do not freeze-thaw DTT more than one time
[0743] 6. Prepare a Master Mix before the first round per Table 9, check it with 0.5 pmol RNA and store aliquots of 48 μl at −20° C. until usage.

TABLE 9
RT-PCR master mix

| | Volume (μl)/ | Final | |
|---|---|---|---|
| Reagent | reaction | concentration | |
| 5× Colorless GoTaq Flexi | 20 | 1× | |
| Buffer Promega cat# M890A | | | |
| 5× first strand buffer | 4 | 0.2× | |
| (Invitrogen) lot# 1300427 | | | |
| 100 mM DTT | 2 | 2 | mM |
| 100 μM SUL1 F primer | 1 | 1 | μM |
| 100 μM SUL1 R primer | 1 | 1 | μM |
| 100 mM MgCl₂ | 1.5 | 1.5 | mM |
| 25 mM (each) dNTPs | 1.2 | 300 | μM |
| MilliQ water | 17.3 | | |
| Total | 48 | | |

[0744] 7. Add 50 μl MilliQ water as negative control (NTC) (pipette this first) or 50 μl selection eluate. Pipet mix.
[0745] 8. Incubate at 65° C. for 5 min.
[0746] 9. After cooling to 4° C., add:
   [0747] 9.1 1 μl Superscript II Reverse Transcriptase (Invitrogen, cat #18064) (200 U/μl)
   [0748] 9.2 1 μl GoTaqFlexi DNA polymerase (5 units/μl) Promega cat #M8305.

### PCR—Program (SARTPCR)

[0749] a) 10 min 54° C.
   [0750] (This step is only for reverse transcriptase, should more rounds be needed, do not repeat step A.)
[0751] b) 1 min 95° C.
[0752] c) 1 min 60° C.
[0753] d) 1 min 72° C.
[0754] 10. Cycle steps b-d for
   [0755] 10.1 1^{st} round b-d 4 cycles. Run 5 μL PCR products on a 4% agarose gel.
      [0756] 10.1.1 Subsequent rounds: The amount of RNA is decreased after the first round, leading to an increase in required PCR-cycles. To determine the number of cycles needed each time, check the band intensity from the agarose gel from the previous round of selection. Use that number of cycles to start the next round of RT-PCR. Note: Always check results on an agarose gel.
         [0757] 10.1.1.1 Agarose gel results: product band should be seen at the target length. The band intensity should be about the same as the 50 bp ladder band (if not a little less intense). If the band is not intense enough (barely visible), cycle an appropriate amount more and re-check on an agarose gel.

### Transcription

[0758] All mixing performed on ice. Prepare transcription Master Mix per Table 10 and store aliquots of 85.7 μl at −20° C. until use.
[0759] 11. Verify pH of stock 200 mM Tris pH 7.9 before use. A change in pH over time may cause problems with the transcription.

TABLE 10
Transcription (TK) Master Mix for SUL1 library

| | Volume (μl) for | Volume (μl) for | Final |
|---|---|---|---|
| Reagent | one reaction | 20 reactions | concentration |
| 5× Transcription buffer | 20 | 400 | 1× |
| (200 mMTris, pH 7.9) | | | |
| 100 mM DTT | 5 | 100 | 5 mM |
| 100 mM ATP | 1 | 20 | 1 mM |
| 100 mM GTP | 1 | 20 | 1 mM |
| 100 mM 2′F-dUTP | 3 | 60 | 3 mM |
| 100 mM 2′F-dCTP | 3 | 60 | 3 mM |
| 100 mM MgCl₂ | 15 | 300 | 15 mM |
| MilliQ water | 37 | 740 | |
| Total volume | 85 | 1700 μl | |

[0760] 12. Add 10 μl RT-PCR product to the mastermix.
[0761] 13. Add 1 μl RNasin (40 units/μl)
   [0762] 13.1 Promega Recombinant RNasin Ribonuclease Inhibitor cat #N2515/N2511
[0763] 14. Add 4 μl T7 Y639F mutant polymerase (25 U/μl use: 100 U total per reaction)
[0764] 15. Perform the reaction for 30 min at 37° C.
[0765] 16. Use the transcription-product directly for the next selection round. If the next step is not feasible, freeze transcription product at −20 C.

### Subsequent Rounds

[0766] Repeat the bead incubation, the RT-PCR and transcription as often as needed. Try to have similar band intensity of the RT-PCR product for the sample in all rounds as noted above.

### Binding Assay

[0767] A binding assay is performed after desired rounds of selection to determine to assess non-specific binding of cancer selected aptamers to control beads (conjugated to supernatant from plasma ultracentrifugation, see above) and likewise for non-cancer control samples. Binding assays can also be performed to assess binding of selected aptamers against the intended target microvesicles.

[0768] Cherenkov protocol: Performed using ³²P radioactively labeled aptamer library.

[0769] Final concentration of selection buffer: 1×PBS+3 mM MgCl₂+0.01% BSA pH 7.4

[0770] Wash buffer: 1×PBS+3 mM MgCl₂ pH 7.4
[0771] 1. Remove microvesicle samples from −80° C. freezer and thaw.
[0772] 2. Place beads on magnet (200,000 per sample experiment), remove bead storage buffer.
[0773] 3. Wash 1×200 μL for 1 minute each with 1×PBS, 3 mM MgCl₂ buffer. Pool beads to make 200,000 in one tube.
[0774] 4. Resuspend beads in 70 μL of the selection buffer. (10 μl of 10×PBS, 1% BSA+3 μL 100 mM MgCl₂+57 μL H₂O per sample).
[0775] 5. Add 30 μL radioactively labeled RNA aptamer library to their respective sample.
[0776] 6. Incubate shaking at 1000 rpm at 37° C. for 30 min.
[0777] 7. Place samples on a magnet.
[0778] 8. Remove and save supernatant.
[0779] 9. Wash beads with 200 μL wash buffer 1×PBS 3 mM MgCl₂ pH 7.4, incubating off the magnet for 3 minute.
[0780] 10. Place samples on the magnet, remove and save wash solution.
[0781] 11. Repeat steps 9, 10.
[0782] 12. Add 100 μL water to the sample, pipette mix.
[0783] 13. Heat at 80° C. for 5 minutes.
[0784] 14. Place samples on a magnet, remove supernatant, and save.
[0785] 15. Resuspend beads in 100 μL water.
[0786] 16. Measure radioactivity of every fraction using scintillation counter.
[0787] 17. Analyze amount of background binding present.

### Negative Selection

[0788] As desired, a negative selection step is added prior to incubating the aptamer library with the beads conjugated to the target microvesicles (i.e., procedure “Binding 2′F SUL1 RNA pool to microvesicle coated magnetic beads” above). The negative selection can be performed using beads conjugated to the supernatant or the input samples (e.g., plasma) after microvesicles are filtered or sedimented from the sample (referred to as “no microvesicle coated beads,” “microvesicle depleted samples,” or similar). The steps are:
[0789] 1) Start with aptamer library product from the desired round after transcription as described above. Wash the beads before start: remove storage buffer, wash beads with 200 μL wash buffer, then replace buffer as stated below:
[0790] 2) Negative selection step: Add and pipet mix 20 μl of transcription product (15 mM MgCl₂) with freshly washed ‘no microvesicle’ coated beads with 10 μL 10×PBS with 1% BSA, 70 μL H₂O. No additional MgCl₂ is needed because the MgCl₂ in the diluted transcription product (TK) provides a final concentration of 3 mM MgCl₂.
[0791] 3) Incubate for 30 min at 37° C., shake at 1000 rpm.
[0792] 4) Remove supernatant and add it to the positive selection beads (directly), which are washed microvesicle coated beads.

[0793] Continue with positive selection incubation. See Binding 2′F SUL1 RNA pool to microvesicle coated magnetic beads above, starting at step 2. Additional steps through transcription are as detailed above.

### Example 12: Additional Aptamers to Breast Cancer (BrCα) Derived Microvesicles

[0794] In this Example, an aptamer library is screened to identify aptamers that distinguish between microvesicles circulating in the blood of breast cancer patients and microvesicles circulating in the blood of healthy, control individuals (i.e., without breast cancer). The procedure used the same samples and aptamer library as in Example 10 above. The procedure in this Example differs in that negative selection was performed before each positive selection starting after the third round of positive selection.

[0795] Negative selection serves to remove aptamers that bind soluble/abundant/non-informative and common proteins for cancer and non-cancer proteins. Negative selection include performing negative selection on the aptamer candidates selected against BrCα+ microvesicles as follows: (i) using microbeads conjugated to the supernatant from the BrCα+ plasma ultracentrifugation step (which should not contain microvesicles); (ii) using microbeads conjugated to the supernatant from the BrCa− plasma ultracentrifugation step (which should not contain microvesicles); (iii) using microbeads conjugated to BrCa− microvesicles. Negative selection can also be performed on the aptamer candidates selected against BrCa− microvesicles as follows: (i) using microbeads conjugated to the supernatant from the BrCα+ plasma ultracentrifugation step (which should not contain microvesicles); (ii) using microbeads conjugated to the supernatant from the BrCa− plasma ultracentrifugation step (which should not contain microvesicles); (iii) using microbeads conjugated to BrCα+ microvesicles. Negative selection rounds are performed between rounds of positive selection as described herein.

[0796] Microvesicles were isolated from plasma of a pool of 60 breast cancer patients (BrCα+). Microvesicles were also isolated from pool of 60 non-cancer samples (BrCα−). Microvesicles were isolated from the plasma using ultracentrifugation (120,000×g). Microvesicles were in the pellet from the ultracentrifugation. The supernatant from the ultracentrifugation was saved to use as a control. The microvesicles from both sample types were conjugated to MagPlex beads (Luminex Corp, Austin TX).

[0797] The aptamer library used consisted of a 2′F SUL1 RNA aptamer library. The sequence is 5′-GGGAGGACGAUGCGG-N40-CAGACGACUCGCUGAGGAUCCGAGA-3′ (SEQ ID NO. 8). The aptamer library consists of three sections: Forward primer—15 nucleotides, variable region—40 nucleotides; reverse primer—25 nucleotides. All pyrimidines (C and U) were 2′Fluoro modified.

[0798] The aptamer library was incubated with either the cancer or control microvesicle-conjugated beads. Nine rounds of positive selection for aptamers that bind the microvesicles were performed in parallel for both types of samples. Negative selection against beads conjugated to the input plasma supernatant after ultracentrifugation before positive selection in rounds 4-9. See Example 11 above for detailed protocol of the positive selection and negative selection steps.

[0799] The aptamers that were retained from the above positive selection were sequenced using Next Generation sequencing technology consisting of Ion Torrent NGS (Life Technologies, Inc., Carlsbad, CA). The MiSeq system may be used also (Illumina, Inc., San Diego, CA). The sequences are compared to identify aptamers that are found in the cancer samples and not the control samples, and vice versa. Such aptamers provide candidates that can be used to distinguish between BrCa and non-BrCa samples.

[0800] The sequencing data was analyzed according to the following procedure:
[0801] Step 1: Sequences were ranked according to frequencies in entire aptamer pool recovered in round 9 after negative selection against beads conjugated to microvesicle-depleted cancer plasma followed by positive selection against beads conjugated to cancer microvesicles.
[0802] Step 2: Fold changes were calculated between noted sample in Step 1 and: (i) same sample after additional negative selection against microvesicle depleted cancer plasma; (ii) same sample after additional negative selection against non-cancer microvesicles; (iii) same sample after additional negative selection against microvesicles depleted non-cancer plasma.
[0803] Step 3: Sequences were ranked based on fold changes calculated in Step 2 to identify sequences which are abundant or deficient in aptamer pool selected for breast cancer derived microvesicles.
[0804] Step 4: Possible mutant sequences (e.g., due to PCR or other errors) were removed based on results of consolidation analysis.
[0805] Step 5: Sequences were identified with fold changes greater than 3 and minimum frequency 50 in all three variants (i, ii and iii in step 2).

[0806] The same selection schemes as in steps 1-5 were performed for aptamers selected against beads conjugated to non-cancer microvesicles.

[0807] A number of representative sequences obtained from these procedures are shown in Table 11. The sequences in the table were identified in the aptamer pools from selection against BrCa microvesicles but were not in the aptamer pools selected against non-cancer samples. In Table 11, the sequences are shown 5′ to 3′ from left to right, wherein each complete sequence consists of a 5′ leader sequence 5′-GGGAGGACGAUGCGG (SEQ ID NO. 9) followed by the indicated Variable Sequence followed by the 3′ tail sequence 5′-CAGACGACUCGCUGAGGAUCCGAGA (SEQ ID NO. 10). Each sequence is derived from a library having a leader and tail (see description above) with a variable sequence between. It is understood that the nucleotide sequences that are disclosed in Table 11 can also be modified to the extent that resulting modifications result in an aptamer having about 50, 55, 60, 65, 70, 75, 80, 85, 90, 95, 96, 97, 98, and 99 percent homology to the disclosed sequence and retain the functionality of binding to microvesicle antigens or functional fragments thereof.

TABLE 11
BrCa microvesicle aptamer candidate sequences

| ID | SEQ ID | |
|---|---|---|
| (FIG.) | NO. | Variable Sequence |
| BCE8 | 25 | UACCGCCUCAUCAUCGGACACGA |
| (FIG. 10Ai) | | CGUGUAUCAGUUGGCUG |
| BCE9 | 26 | GUUCUCGCCUCUGUCCUCAUGGU |
| (FIG. 10Aii) | | UCGAACCGGUAUGCAUG |
| BCE 10 | 27 | GCGGUUUCUUCUCCUGACUACAU |
| (FIG. 10Aiii) | | GAGAUUAAUAAACGCGC |
| BCE11 | 28 | CCGCCUCGAACACUGACGUCGUG |
| (FIG. 10Aiv) | | GAACCUUCGAUUGCUAG |
| BCE12 | 29 | AAUCACAGUAAUUCUGCCCCUCU |
| (FIG. 10Av) | | GAUGAAACCGGUUACUU |
| BCE13 | 30 | CUUAGUGAUUUCGCCGCCCCUCU |
| (FIG. 10Avi) | | GUUUAGUGGCCAUUGGA |
| BCE14 | 31 | ACACUAUUCCGGUAAGUCAUCGU |
| (FIG. 10Avii) | | UUAACCGUUUGUUGCAA |
| BCE15 | 32 | UGCGCAACGCCUUGAUUCACUCC |
| (FIG. 10Aviii) | | UACAGUGUGUCUAUAGA |
| BCE16 | 33 | AAUGUUAAGCUUACAUACGCCUG |
| (FIG. 10Aix) | | GGUCACUCUUUGUUCUG |
| BCE17 | 34 | GUAAAUAUUCACGUUGAAUCGCC |
| (FIG. 10Bi) | | UUGCUCCUCUUAGUCUG |
| BCE18 | 35 | CCGCCUCGGAUCGUUCCCAAUGG |
| (FIG. 10Bii) | | UGGUACCCCUAUUAAUG |
| BCE19 | 36 | UGUAGAUCGUUCUUAUCCGCCUC |
| (FIG. 10Biii) | | GGUCUUCCCCAGGUUAA |
| BCE20 | 37 | AUCGUCGGGCCCCUUUUAUGAAA |
| (FIG. 10Biv) | | CUUACAUGAAAGCGCAC |
| BCE21 | 38 | UAAGAGUGCACAGUACUGCCUCG |
| (FIG. 10Bv) | | AUCCUCCAUGGCUUAAG |
| BCE22 | 39 | GAAUUAGUACUGACGGCCGCCUU |
| (FIG. 10Bvi) | | GAUCCUCCGUUAGUCUG |
| BCE23 | 40 | GCCCGCCUCCGAAGCCCUCCUAA |
| (FIG. 10Bvii) | | GUGCACUUUAAACCGCG |
| BCE24 | 41 | CCGCCUGGGAUCACUCUCUACGC |
| (FIG. 10Bviii) | | GUAUAAAUGCUCUGUCA |
| BCE25 | 42 | AGUCUGACCCUGUUAUGGACUAC |
| (FIG. 10Bix) | | CAUAUCAGAAAGGUACU |
| BCE26 | 43 | GGUGAUCCUCCCCCCCGCCUCGA |
| (FIG. 10Ci) | | AGAUUUGUGCACAUAUC |
| BCE27 | 44 | GCUACCAUCGUCUAGUGAGUCAC |
| (FIG. 10Cii) | | CCUUAGUUCAUCAAGGC |

[0808] Each sequence in Table 11 is synthesized in two variants for further investigation: 5′ biotinylated and 3′ biotinylated. This provides aptamer variants that can be captured at the 5′ end or the 3′ end as desired. The aptamers are further synthesized with each pyrimidine (C and U) 2′Fluoro modified. The aptamers may also be synthesized as the DNA sequence corresponding to each RNA sequence in Table 11. The aptamer libraries can also be filtered based on predicted secondary sequence, free energy, and other parameters as described herein.

[0809] FIGS. 10A-C show binding of the aptamers in Table 11 against microbeads conjugated to various input samples. The aptamer is indicated above each plot and the plot for each aptamer is indicated in the ID column in Table 11. The input sample is indicated on the X axis from left to right as follows: 1) Cancer Exosome: aptamer binding to microbeads conjugated to microvesicles isolated from plasma samples from breast cancer patients; 2) Cancer Non-exosome: aptamer binding to microbeads conjugated to plasma samples from breast cancer patients after removal of microvesicles by ultracentrifugation; 3) Non-Cancer Exosome: aptamer binding to microbeads conjugated to microvesicles isolated from plasma samples from normal (i.e., non-breast cancer) patients; 4) Non-Cancer Non-Exosome: aptamer binding to microbeads conjugated to plasma samples from breast cancer patients after removal of microvesicles by ultracentrifugation. As shown in FIGS. 10A-C, the aptamers were each able to distinguish between the cancer microvesicle samples versus the supernatant control samples and the non-cancer microvesicles. Further, all sequences in Table 11 were observed as binding more abundantly to cancer derived microvesicles as compared to non-cancer derived microvesicles with the exception of BCE10 and BCE14, which were observed as binding more abundantly to non-cancer derived microvesicles as compared to cancer derived microvesicles.

[0810] Based on the comparisons performed in this Example, aptamers that bind different starting input are obtained, including: 1) aptamers that preferentially bind cancer-derived microvesicles over non-cancer derived microvesicles; 2) aptamers that preferentially bind non-cancer-derived microvesicles over cancer derived microvesicles; 3) aptamers that bind both non-cancer-derived microvesicles and cancer derived microvesicles (e.g., “universal” binders); and 4) aptamers that bind plasma components that have been depleted of microvesicles.

[0811] The aptamer libraries in this Example are further subjected to four rounds of additional negative and positive selection. The positive selection is performed as described in this Example. The negative selection rounds are performed using the beads conjugated to non-cancer microvesicles as negative selection for aptamers obtained by positive selection against beads conjugated to cancer microvesicles. Similarly, the negative selection rounds are performed using the beads conjugated to cancer microvesicles as negative selection for aptamers obtained by positive selection against beads conjugated to non-cancer microvesicles.

### Example 13: Disease Diagnosis

[0812] This example illustrates the use of oligonucleotide probes of the present invention to diagnose a proliferative disease.

[0813] A suitable quantity of an oligonucleotide or pool of oligonucleotides that bind a BrCα-derived population of microvesicles, such as identified in Example 10 or Example 12 or various Examples below, is synthesized via chemical means known in the art. The oligonucleotides are conjugated to a diagnostic agent suitable for detection, such as a fluorescent moiety, using a conjugation method known in the art.

[0814] The composition is applied to microvesicles isolated from blood samples taken from a test cohort of patients suffering from a proliferative disease associated with the overexpression of microvesicles, e.g. breast cancer. The composition is likewise applied to microvesicles isolated from blood samples taken from a negative control cohort, not suffering from a proliferative disease.

[0815] The use of appropriate detection techniques (e.g., microbead assay or flow cytometry) on the test cohort samples indicates the presence of disease, while the same techniques applied to the control cohort samples indicate the absence of disease.

[0816] The results show that the oligonucleotides of the present invention are useful in diagnosing proliferative diseases.

### Example 14: Theranostics

[0817] This example illustrates the use of oligonucleotide probes of the present invention to provide a theranosis for a drug for treating a proliferative disease.

[0818] A suitable quantity of an oligonucleotide or pool of oligonucleotides that bind a BrCα-derived population of microvesicles, such as identified in Example 10 or Example 12 or various Examples below, is synthesized via chemical means known in the art. The probes are conjugated to an agent suitable for detection, such as a fluorescent moiety, using a method known in the art such as conjugation. The oligonucleotide probe or panel of oligonucleotide probes are within a suitable composition, such as a buffered solution.

[0819] Treatment selection. The composition is applied to microvesicles isolated from blood samples taken from a test cohort of patients suffering from a proliferative disease, e.g. breast cancer, that responded to a certain treatment, e.g., trautuzamab. The composition is likewise applied to microvesicles isolated from blood samples taken from a control cohort consisting of patients suffering from the same proliferative disease that did not respond to the treatment. The use of appropriate detection techniques (e.g., microbead assay or flow cytometry) on the test cohort samples indicates that probes which bind the samples are useful for identifying patients that will respond to the treatment, while the same techniques applied to the control cohort samples identifies probes useful for identifying patients that will not respond to the treatment.

[0820] Treatment monitoring. In another setting, the composition is applied to microvesicles isolated from blood samples taken from a test cohort of patients suffering from a proliferative disease, e.g. breast cancer, prior to or during a course of treatment, such as surgery, radiotherapy and/or chemotherapy. The composition is then applied to microvesicles isolated from blood samples taken from the patients over a time course. The use of appropriate detection techniques (e.g., microbead assay or flow cytometry) on the test cohort samples indicates whether the detected population of disease-related microvesicles increases, decreases, or remains steady in concentration over time during the course of treatment. An increase in the population of disease-related microvesicles post-treatment may indicate that the treatment is ineffective whereas a decrease in the population of disease-related microvesicles post-treatment may indicate that the treatment has a beneficial effect.

[0821] The results show that the oligonucleotide probes of the present invention are useful in theranosing proliferative diseases.

### Example 15: Therapeutic Oligonucleotide Probes

[0822] This example illustrates the use of oligonucleotide probes of the present invention to treat a proliferative disease.

[0823] A suitable quantity of an oligonucleotide or pool of oligonucleotides that bind a BrCα-derived population of microvesicles, such as identified in Example 10 or Example 12 or various Examples below, is synthesized via chemical means known in the art. The oligonucleotides are conjugated to a chemotherapeutic agent, such as Doxil, using a conjugation method known in the art. The conjugate is formulated in an aqueous composition.

[0824] The composition is administered intravenously, in one or more doses, to a test cohort of mice suffering from a proliferative disease associated with the overexpression of the microvesicles, e.g. a breast cancer model. A control cohort, not suffering from a proliferative disease is administered the identical composition intravenously, according to a corresponding dosage regimen.

[0825] Pathological analysis of tumor samples and/or mouse survival indicates that mortality and/or morbidity are improved in the test cohort over the control cohort.

[0826] The results show that the oligonucleotides of the present invention are useful in treating proliferative diseases.

[0827] Useful oligonucleotides can be used to treat proliferative diseases in other organisms, e.g., a human.

### Example 16: Oligonucleotide—Sequencing Detection Method

[0828] This example illustrates the use of an oligonucleotide pool to detect microvesicles that are indicative of a phenotype of interest. The method makes use of a pool of oligonucleotides that have been enriched against a target of interest that is indicative of a phenotype of interest. The method in this Example allows efficient use of a library of oligonucleotides to preferentially recognize a target entity.

[0829] For purposes of illustration, the method is described in the Example with a microvesicle target from a bodily fluid sample. One of skill will appreciate that the method can be extended to other types of target entity (e.g., cells, proteins, various other biological complexes), sample (e.g., tissue, cell culture, biopsy, other bodily fluids) and other phenotypes (other cancers, other diseases, etc) by enriching an aptamer library against the desired input samples.

### General Workflow:

[0830] 1) Obtain sample (plasma, serum, urine or any other biological sample) of patients with unknown medical etymology and pre-treating them accordingly to ensure availability of the target of interest (see below). Where the target of interest is a microvesicle population, the microvesicles can be isolated and optionally tethered to a solid support such as a microbead.
[0831] 2) Expose pre-treated sample to an oligonucleotide pool carrying certain specificity against target of interest. As described herein, an oligonucleotide pool carrying certain specificity against the target of interest can be enriched using various selection schemes, e.g., using non-cancer microvesicles for negative selection and cancer microvesicles for positive selection as described above. DNA or RNA oligonucleotides can be used as desired.
[0832] 3) Contact oligonucleotide library with the sample.
[0833] 4) Elute any oligonucleotides bound to the target.
[0834] 5) Sequence the eluted oligonucleotides. Next generation sequencing methods can be used.
[0835] 6) Analyze oligonucleotide profile from the sequencing. A profile of oligonucleotides known to bind the target of interest indicates the presence of the target within the input sample. The profile can be used to characterize the sample, e.g., as cancer or non-cancer.

### Protocol Variations:

[0836] Various configurations of the assay can be performed. Four exemplary protocols are presented for the purposes of the oligonucleotide-sequencing assay. Samples can be any appropriate biological sample. The protocols can be modified as desired. For example, the microvesicles can be isolated using alternate techniques instead or or in addition to ultracentrifugation. Such techniques can be disclosed herein, e.g., polymer precipitation (e.g., PEG), column chromatography, and/or affinity isolation.

### Protocol 1:

[0837] Ultracentrifugation of 1-5 ml bodily fluid samples (e.g., plasma/serum/urine) (120K×g, no sucrose) with two washes of the precipitate to isolate microvesicles.

[0838] Measure total protein concentration of recovered sample containing the isolated microvesicles.

[0839] Conjugate the isolated microvesicles to magnetic beads (for example MagPlex beads (Luminex Corp. Austin TX)).

[0840] Incubate conjugated microvesicles with oligonucleotide pool of interest.

[0841] Wash unbound oligonucleotides by retaining beads using magnet.

[0842] Elute oligonucleotides bound to the microvesicles.

[0843] Amplify and purify the eluted oligonucleotides.

[0844] Oligonucleotide sequencing (for example, Next generation methods; Ion Torrent: fusion PCR, emulsion PCR, sequencing).

[0845] Assess oligonucleotide profile.

### Protocol 2:

[0846] This alternate protocol does not include a microvesicle isolation step, microvesicles conjugation to the beads, or separate partitioning step. This may present non-specific binding of the oligonucleotides against the input sample.

[0847] Remove cells/debris from bodily fluid sample and dilute sample with PBS containing MgCl₂ (2 mM).

[0848] Pre-mix sample prepared above with oligonucleotide library.

[0849] Ultracentrifugation of oligonucleotide/sample mixture (120K×g, no sucrose). Wash precipitated microvesicles.

[0850] Recover precipitate and elute oligonucleotides bound to microvesicles.

[0851] Amplify and purify the eluted oligonucleotides.

[0852] Oligonucleotide sequencing (for example, Next generation methods; Ion Torrent: fusion PCR, emulsion PCR, sequencing).

[0853] Assess oligonucleotide profile.

### Protocol 3:

[0854] This protocol uses filtration instead of ultracentrifugation and should require less time and sample volume.

[0855] Remove cells/debris from bodily fluid sample and dilute it with PBS containing MgCl₂ (2 mM).

[0856] Pre-mix sample prepared above with oligonucleotide library.

[0857] Load sample into filter (i.e., 150K or 300K MWCO filter or any other that can eliminate unbound or unwanted oligonucleotides). Centrifuge sample to concentrate. Concentrated sample should contain microvesicles.

[0858] Wash concentrate. Variant 1: Dilute concentrate with buffer specified above to the original volume and repeat centrifugation. Variant 2: Dilute concentrate with buffer specified above to the original volume and transfer concentrate to new filter unit and centrifuge. Repeat twice.

[0859] Recover concentrate and elute oligonucleotides bound to microvesicles.

[0860] Amplify and purify the eluted oligonucleotides.

[0861] Oligonucleotide sequencing (for example, Next generation methods; Ion Torrent: fusion PCR, emulsion PCR, sequencing).

[0862] Assess oligonucleotide profile.

### Protocol 4:

[0863] Ultracentrifugation of 1-5 ml bodily fluid sample (120K×g, no sucrose) with 2 washes of the precipitate to isolate microvesicles.

[0864] Pre-mix microvesicles with oligonucleotide pool.

[0865] Load sample into 300K MWCO filter unite and centrifuge (2000×g). Concentration rate is ˜3×.

[0866] Wash concentrate. Variant 1: Dilute concentrate with buffer specified above to the original volume and centrifuge. Repeat twice. Variant 2: Dilute concentrate with buffer specified above to the original volume and transfer concentrate to new filter unit and centrifuge. Repeat twice

[0867] Recover concentrate and elute oligonucleotides bound to microvesicles.

[0868] Amplify and purify the eluted oligonucleotides.

[0869] Oligonucleotide sequencing (for example, Next generation methods; Ion Torrent: fusion PCR, emulsion PCR, sequencing).

[0870] Assess oligonucleotide profile.

[0871] In alterations of the above protocols, polymer precipitation is used to isolate microvesicles from the patient samples. For example, the oligonucleotides are added to the sample and then PEG4000 or PEG8000 at 4% or 8% concentration is used to precipitate and thereby isolate microvesicles. Elution, recovery and sequence analysis continues as above.

### Example 17: Plasma/Serum Probing with an Oligonucleotide Probe Library

[0872] The following protocol is used to probe a plasma or serum sample using an oligonucleotide probe library.

### Input Oligonucleotide Library:

[0873] Use 2 ng input of oligonucleotide library per sample.

[0874] Input oligonucleotide library is a mixture of two libraries, cancer and non-cancer enriched, concentration is 16.3 ng/ul.

[0875] Dilute to 0.2 ng/ul working stock using Aptamer Buffer (3 mM MgCl₂ in 1×PBS)

[0876] Add 10 ul from working stock (equal to 2 ng library) to each optiseal tube

### Materials:

[0877] PBS, Hyclone SH30256.01, LN: AYG165629, bottle #8237, exp. July 2015

[0878] Round Bottom Centrifuge Tubes, Beckman 326820, LN:P91207

[0879] OptiSeal Centrifuge tubes and plugs, polyallomer Konical, Beckman 361621, lot #Z10804SCA

[0880] Ultracentrifuge rotor: 50.4 TI

[0881] Ultracentrifuge rotor: 50.4 TI, Beckman Caris ID #0478

### Protocol:

[0882] 1 Pre-chill tabletop centrifuge, ultracentrifuge, buckets, and rotor at 4° C.
[0883] 2 Thaw plasma or serum samples
[0884] 3 Dilute 1 ml of samples with 1:2 with Aptamer Buffer (3 mM MgCl₂ in 1×PBS)
[0885] 4 Spin at 2000×g, 30 min, 4° C. to remove debris (tabletop centrifuge)
[0886] 5 Transfer supernatants for all samples to a round bottom conical
[0887] 6 Spin at 12,000×g, 45 min, 4° C. in ultracentrifuge to remove additional debris.
[0888] 7 Transfer supernatant about 1.8 ml for all samples into new OptiSeal bell top tubes (uniquely marked).
[0889] 8 Add 2 ng (in 10 ul) of DNA Probing library to each optiseal tube
[0890] 9 QS to 4.5 ml with Aptamer Buffer
[0891] 10 Fix caps onto the OptiSeal bell top tubes
[0892] 11 Apply Parafilm around caps to prevent leakage
[0893] 12 Incubate plasma and oligonucleotide probe library for 1 hour at room temperature with rotation
[0894] 13 Remove parafilm (but not caps)
[0895] 14 Place correct spacer on top of each plugged tube
[0896] 15 Mark pellet area on the tubes, insure this marking is facing outwards from center.
[0897] 16 Spin tubes at 120,000×g, 2 hr, 4° C. (inner row, 33,400 rpm) to pellet microvesicles.
[0898] 17 Check marking is still pointed away from center.
[0899] 18 Completely remove supernatant from pellet, by collecting liquid from opposite side of pellet marker and using a 10 ml syringe barrel and 21G2 needle
[0900] 19 Discard supernatant in appropriate biohazard waste container
[0901] 20 Add 1 ml of 3 mM MgCl2 diluted with 1×PBS
[0902] 21 Gentle vortex, 1600 rpm for 5 sec and incubate 5 min at RT.
[0903] 22 QS to ˜4.5 mL with 3 mM Mg C12 diluted with 1×PBS
[0904] 23 Fix caps onto the OptiSeal bell top tubes.
[0905] 24 Place correct spacer on top of each plugged tube.
[0906] 25 Mark pellet area on the tubes, insure this marking is facing outwards from center.
[0907] 26 Spin tubes at 120,000×g, 70 min, 4° C. (inner row 33,400 rpm) to pellet microvesicles
[0908] 27 Check marking in still pointed away from center.
[0909] 28 Completely remove supernatant from pellet, by collecting liquid from opposite side of pellet marker and using a 10 ml syringe barrel and 21G2 needle
[0910] 29 Discard supernatant in appropriate biohazard waste container
[0911] 30 Add 1 ml of 3 mM MgCl2 diluted with 1×PBS
[0912] 31 Gentle vortex, 1600 rpm for 5 sec and incubate 5 min at RT.
[0913] 32 QS to ˜4.5 mL with 3 mM Mg C12 diluted with 1×PBS
[0914] 33 Fix caps onto the OptiSeal bell top tubes.
[0915] 34 Place correct spacer on top of each plugged tube.
[0916] 35 Mark pellet area on the tubes, insure this marking is facing outwards from center.
[0917] 36 Spin tubes at 120,000×g, 70 min, 4° C. (inner row 33,400 rpm) to pellet microvesicles
[0918] 37 Check marking is still pointed away from center.
[0919] 38 Save an aliquot of the supernatant (100 ul into a 1.5 ml tube)
[0920] 39 Completely remove supernatant from pellet, by collecting liquid from opposite side of pellet marker and using a 10 ml syringe barrel and 21G2 needle
[0921] 40 Add 50 ul of Rnase-free water to the side of the pellet
[0922] 41 Leave for 15 min incubation on bench top
[0923] 42 Cut top off tubes using clean scissors.
[0924] 43 Resuspend pellet, pipette up and down on the pellet side
[0925] 44 Measure the volume, make a note on the volume in order to normalize all samples
[0926] 45 Transfer the measured resuspended eluted microvesicles with bound oligonucleotides to a Rnase free 1.5 ml Eppendorf tube
[0927] 46 Normalize all samples to 100 ul to keep it even across samples and between experiments.

### Next Generation Sequencing Sample Preparation:

[0928] I) Use 50 ul of sample from above, resuspended in 100 ul H2O and containing microvesicle/oligo complexes, as template in Transposon PCR, 14 cycles.
[0929] II) AMPure transposon PCR product, use entire recovery for indexing PCR, 10 cycles.
[0930] III) Check indexing PCR product on gel, proceed with AMPure if band is visible. Add 3 cycles if band is invisible, check on gel. After purification quantify product with QuBit and proceed with denaturing and diluting for loading on HiSeq flow cell (Illumina Inc., San Diego, CA).
[0931] IV) 5 samples will be multiplexed per one flow cell. 10 samples per HiSeq.

### Example 18: Enrichment of Oligonucleotides to Breast Cancer (BrCα) and Non-BrCa Derived Microvesicles

[0932] In this Example, a naïve oligonucleotide probe library is screened to enrich oligonucleotides that identify microvesicles circulating in the blood of breast cancer patients and microvesicles circulating in the blood of healthy, control individuals (i.e., without breast cancer). The procedure in this Example used the 9-round selection scheme shown in FIG. 11A.

[0933] In FIGS. 11A-11B, the following abbreviations are used: CE—Cancer exosome samples; NCE—Non-cancer exosome samples; CNE—Cancer no exosome samples; NCNE—Non-cancer no exosome samples; MFI—Median Fluorescence Intensity; GC—GC content group analysis; Heat—heat elution; NaOH—sodium hydroxide elution. The terms exosome and microvesicle are used interchangeably.

[0934] As indicated in FIG. 11A, 0.1 mg/mL salmon sperm DNA was added as a competitor in selection rounds 7-9. FIG. 11B shows the enrichment of aptamers that bind to microvesicles (CE and NCE). Binding was determined by fluorescently labeling aptamer candidates and detecting binding to bead-capture microvesicles using a microbead assay format. At the end of round 9, only aptamers having GC content between ˜30% and 70% were selected to generate panels to differentiate cancer and non-cancer samples. In addition, several groups of aptamers were selected using the following criteria: 1) 12 most commonly observed; 2) 12 most commonly observed having >2-fold change in binding observed between cancer and normal samples; 3) 30 most commonly observed having >2-fold change in binding observed between cancer and normal samples, >10 read counts in the library determined by high throughput sequencing, heat elution after selection round 9; and 4) 30 most commonly observed having >2-fold change in binding observed between cancer and normal samples, >10 read counts in the library determined by high throughput sequencing, NaOH elution after selection round 9.

[0935] Retained sequences are shown in Table 12 with selection criteria 1-4 indicated. In Table 12, the sequences are shown 5′ to 3′ from left to right, wherein each complete sequence consists of a 5′ leader sequence 5′-GCTGTGTGACTCCTGCAA (SEQ ID NO. 45) followed by the indicated Variable Sequence followed by the 3′ tail sequence 5′-GCAGCTGTATCTTGTCTCC (SEQ ID NO. 46).

TABLE 12
BrCa microvesicle oligonucleotide sequences

| SEQ ID | Selection | |
|---|---|---|
| NO. | Criteria | Variable Sequence |
| 47 | 3 | GTCCGCTTGGGGGTGGGTATCGAAAATTCGCGTTCTGGGGCGG |
| 48 | 3 | CTTCGCTCGTTTCAATGTTCAGTTCTGGTCTTTAGGTCTTTAG |
| 49 | 3 | TAGGAGGATAATATGTATCCGGTGCATCGGCCTGACTTTCCCC |
| 50 | 3 | TAGGAGGGCTGAAAACTTGCTTCTTCCCGGTGCAGTTATAACA |
| 51 | 3 | TAGGAGGATAATATGTATCCGATGCATGGGCCCGACTTTCCCC |
| 52 | 3 | TGCGTTTTCCTTGGGGTTCAGGGTAGGATGGGGGTGGAGGTGG |
| 53 | 3 | GGGGGGCGGGTGGGCTGGTAAAAGGTGATGCGGGGGTATTGTT |
| 54 | 3 | TAGGAGGATAATATGTATCCGGTGCATCGGCCCAACTTTCCCC |
| 55 | 3 | CCAATCTCGGAAGGTTTAAATAAGGTGGTCTTTAGGTCTTTAG |
| 56 | 3 | TACGTTAAGTGGGTCGGGAGGGGGGAATAGGGGGTTTGGTTGG |
| 57 | 3 | GTGAGGTCGGTGGGGCGGGGGATGGTGGGGGGTCGTTTACATT |
| 58 | 3 | CGATATTGGGGGGGGGTTGGCGGGCTATTTTCCGGGTGGGTG |
| 59 | 3 | TCGGTTCCTGTTAATTCGCTGGTGGTTGGTGGGGTGGCGGATG |
| 60 | 3 | GCGGGGAGGTGGGGGTGGGTGGAGGGTTGGTTACTCTCTACT |
| 61 | 3 | CGGGAATGGGAGGGTGGGGGTGGTGGCCGGGCGTGTTATACC |
| 62 | 3 | TAGGAGGATAATATGTATCCGGTGCATCGGTCCGACTTTCCCC |
| 63 | 3 | TATAGTTGGGCGTAGGCGGGGGGGGGTGGTTGGGAGGTCCAAG |
| 64 | 3 | TAGGAGGATAATATGTATCCGGTGCATCGGCCCGACCTTCCCC |
| 65 | 3 | TCGATCGTCCTCAGGATCTCGTGGTTCAAATCATAAAGATTAT |
| 66 | 3 | TGCTGTCTGGGCGGGGGCGGTCTTGTGGTTTCTTTGGGGGGGG |
| 67 | 3 | GCGAGACAGGAGGGTGGTCTTATACGTGGGGGGGGGTGGTTGG |
| 68 | 3 | TAGGAGGGCTGAAGACTTGCTTCTTCCCGGTGCAGTTATAACA |
| 69 | 3 | CGTGTGGGGGGTGGGTTGGGCTCGGGTTGTTATCAGTTCCATG |
| 70 | 3 | CGATATTGGGGGGGGGGTTGGCGGGCTATTTTCCGGGTGGGTG |
| 71 | 3 | TAGGAGGATAATATGTATCCGGTGCATCGGCCCGACTTTCCTC |
| 72 | 3 | TAGGAGGATAATATGTATCCGGTGCATCGGCTCGACTTTCCCC |
| 73 | 3 | CTTCGCTCGTTTCAATGTTTAGTTCTGGTCTTTAGGTCTTTAG |
| 74 | 3 | GGACATGGGTTGGGTCGGGAGGGGGTGGTCGGTTGGGCAGTAA |
| 75 | 3 | TAGGAGGATAATATGTATACGATGCATCGGCCCGACTTTCCCC |
| 76 | 3 | TAGGAGGATAATATGTATCAGATGCATCGGCCCGACTTTCCCC |
| 77 | 4 | TGGATGTATGGGGTCTCGGGGTGGGAGGGTTCAACTTATCTGG |
| 78 | 4 | GTCCGCTTGGGGGTGGGTATCGAAAATTCGCGTTCTGGGGCGG |
| 79 | 4 | TCTTGTACAAATAGGAGGGAAGGGGGTTTTGGGAGGTGGGTGG |
| 80 | 4 | CTTCGCTCGTTTCAATGTTCAGTTCTGGTCTTTAGGTCTTTAG |
| 81 | 4 | CTGATGTTAGTAGGTCGGGGTCCGGTTGGGGGTTGGGTTGAGG |
| 82 | 4 | TGGCTCGTGGACGTGGTGGTGGCGGGTCGTGGGGGTGGGTAGG |
| 83 | 4 | TAGGAGGATAATATGTATCCGATGCATCGGCACGACTTTCCCC |
| 84 | 4 | CGGGGAGGGGGGGTCGGGGTATTTATTGTGTATGTTTTTTGTG |
| 85 | 4 | TGACTGTATCTTGGGGCGGGTTCTGGGGGGGGTGTATTGTTCA |
| 86 | 4 | TAGGAGGATAATATGTATCCGATGCATCGGCCCGACTTTCACC |
| 87 | 4 | TCATGTCTAGGGGGGGGAAGTCGGTTTGGGTGGGTACTCTGTG |
| 88 | 4 | CTTGTTTCGCTTTGGGTTTGGGCGGGTGGGTCAATTCCTGTTG |
| 89 | 4 | GGTGGGGGCCCTCGGTACTGTGGCGGGGTGGGTGGGTTTAGTG |
| 90 | 4 | TGCGTTTTCCTTGGGGTTCAGGGTAGGATGGGGGTGGAGGTGG |
| 91 | 4 | TGGTGGGGTGGGTCTGTGGGGTGGTTTTGTTCTTATCGGGGTT |
| 92 | 4 | TGGGTGGGTTACGGGTGGGTGTTGTTATCGCGCTGATCTGGTT |
| 93 | 4 | CGTGACGGTTTTAATCAGGGGGGGGACTCTAACATTTGGGTGG |
| 94 | 4 | TGCTCATATCGTGGGGGGATGGGGTTGCTAGTGGATGGGGTGG |
| 95 | 4 | GGGGGGCGGGTGGGCTGGTAAAAGGTGATGCGGGGGTATTGTT |
| 96 | 4 | TGATGTGGGGGGTGGGGTATAATACTTATGTTTGGGGTTTGGG |
| 97 | 4 | TTGGGTGGGTGGGAATGGGTATTTTTTCTTCGGGCGATGTTTG |
| 98 | 4 | TAGTTGGATACTGGATTTGGGAGGGATGGGGGGAGGAGGGTGG |
| 99 | 4 | CTGGAAGGTTGGGTGTGGGGCGGGGGGGAGGTCTCTCTATGT |
| 100 | 4 | TACGTTAAGTGGGTCGGGAGGGGGGAATAGGGGGTTTGGTTGG |
| 101 | 4 | TGCCGTGGGCCGGGGAGGGTGGGTTGGCGTCTCTGTTTCGATA |
| 102 | 4 | GGGGGGGCGGCCGGGGTGGACTGTGGCCCGTCTTCGTATTGTT |
| 103 | 4 | TGGTGGTGGCTGGGGGACGGGTATCCTGGAATTAGGGGTGGG |
| 104 | 4 | TCGGTTCATGTTGGGTGGGATCGGGGCGGGGTTTCTTCTCCTG |
| 105 | 4 | TAGGAGGATAATATGTATACGATGCATCGGCCCGACTTTCCCC |
| 106 | 4 | TCGTGGGTGTGTTCTGGGGGGCGTGGACGGGGGTTAATGGGCA |
| 107 | 1 | TAGGAGGATAATATGTATCCGATGCATCGGCCCGACTTTCCCC |
| 108 | 1 | TAAGAGTCTTAGGATGACGTCATTCGTCCGTCACGGTGCGGGA |
| 109 | 1 | GCCTGGCCAGATAGCAGTTACCTTACGGGATCTATATTCACCG |
| 110 | 1 | TGGCTCGTGGACGTGGTGGTGGCGGGTCGTGGGGGTGGGTAGG |
| 111 | 1 | TTCGTGTTCATCTGTTTATTGTTATTCACAATCCGTCTTTTGT |
| 112 | 1 | CGAATCCGTCGACCGCCCTCGTAACCATCCAACCCAGTCTCCT |
| 113 | 1 | CAGGAAAGTTACTTATCTTTTAGACGGTTATGTTCTCATTACT |
| 114 | 1 | ATCTGCTCGATACGTAGATAGTCTGCTCGATACAAAAGGGTGG |
| 115 | 1 | CGATGAGCGGGCTCCGATATTGTGTCGGCGTGACTACCTTGAT |
| 116 | 1 | GGTCGGCCTATTTATTGCGGCACGTTGTTTCTTGATGTCGCCC |
| 117 | 1 | TCGAATTCAGTTCTACATGTGTATTTCTTGCTCCGTTTCAGAA |
| 118 | 1 | TCGGTCCGGCAACAAACCCCACGCGCCTTCGATATGCCTGTCG |
| 119 | 2 | CCAATCTCGGAAGGTTTAAATAAGGTGGTCTTTAGGTCTTTAG |
| 120 | 2 | CGATATTGGGGGGGGGGTTGGCGGGCTATTTTCCGGGTGGGTG |
| 121 | 2 | CGGGAATGGGAGGGTGGGGGTGGTGGCCGGGTCGTGTTATACC |
| 122 | 2 | CGTGGTGGGTTCTTGGGTGGGGGGGGAGGGTTGGCGTAGTATA |
| 123 | 2 | GTGAGGTCGGTGGGGCGGGGGATGGTGGGGGGTCGTTTACATT |
| 124 | 2 | TACGTTAAGTGGGTCGGGAGGGGGGAATAGGGGGTTTGGTTGG |
| 125 | 2 | TAGGAGGATAATATGTATCCGGTGCATCGGCCCAACTTTCCCC |
| 126 | 2 | TAGGAGGGCTGAAAACTTGCTTCTTCCCGGTGCAGTTATAACA |
| 127 | 2 | TCGGTTCCTGTTAATTCGCTGGTGGTTGGTGGGGTGGCGGATG |
| 128 | 2 | TGCTGTCTGGGCGGGGGCGGTCTTGTGGTTTCTTTGGGGGGGG |
| 129 | 2 | AACATGGGGTTCTGATAAACCTGTGCCAAATACATTGTTGAGT |
| 130 | 2 | ATTCCTCCTTTGTAAGGGATGATATCCAACTCCTCTGCGTTCG |

[0936] Individual aptamer candidates in Table 12 are synthesized. The aptamers are labeled with a fluorescent label and used to detect binding to bead-capture microvesicles using a microbead assay format. The microbead results are used to identify aptamers and panels of aptamers that differentiate cancer and non-cancer plasma samples.

### Example 19: Aptamer Based Precipitation of Microvesicles in Plasma

[0937] Aptamers can specifically recognize target proteins with nanomolar affinity and have some potential advantages compared to antibodies due to their chemical stability, ease of synthesis and overall reproducibility. Microvesicles were isolated from a rat glioma cell line model that expresses or does not express the human EGFR protein in order to optimize aptamer-microvesicle complex formation and isolation in plasma. Microvesicles spiked into human plasma were precipitated with the positive EGFR DNA or RNA aptamer but not with a reverse complement control sequence. There was no observed binding of the positive or negative aptamer to microvesicles that do not express EGFR. Binding of aptamers to microvesicles was confirmed with aptamer based ELISAs, EMSA assays, and flow cytometry. These results demonstrate aptamer-based precipitation of microvesicles from a complex biological sample.

### Example 20: Quantitative Proteomics of EGFR, EGFRviii, and EGFR Negative Microvesicles from a Rat Glioma Cell Line

[0938] In this Example, we performed quantitative proteomics on microvesicles isolated from a rat glioma cell line F98 (parental line), F98(EGFR) and F98(EGFRviii). Different lots of microvesicles purified from each cell line type were considered biological replicates and each biological replicate was analyzed in four technical replicates by tandem mass tag 6-plex (TMT) peptide labeling and LC-MS/MS. The general microvesicle markers CD81, CD9, CD63, Tsg101, and Alix were identified in all technical replicates. Multiple proteins were found to be up or down-regulated including a 7.5-fold increase in EGFR and a 2.6-fold increase in the EGFR binding partner HMCN2 in the F98[EGFR] compared with the parental line. These results indicate that expression of a single biomarker may affect global proteomic changes in microvesicles.

### Example 21: Oligonucleotide Probe Library

[0939] This Example presents further development of the oligonucleotide probe library to detect biological entities such as described in Example 18 above. In this Example, steps were taken to reduce the presence of double stranded oligonucleotides (dsDNA) when probing the patient samples. The data were also generated comparing the effects of 8% and 6% PEG used to precipitate microvesicles (and potentially other biological entities) from the patient samples.

### Protocol:

[0940] 1) Pre-chill tabletop centrifuge at 4° C.
[0941] 2) Protease inhibition: dissolve 2 tablets of “cOmplete ULTRA MINI EDTA-free EASYpack” protease inhibitor in 1100 ul of H₂O (20× stock of protease inhibitor).
[0942] 3) Add 50 ul of protease inhibitor to the sample (on top of frozen plasma) and start thawing: 1 ml total ea.
[0943] 4) To remove cells/debris, spin samples at 10,000×g, 20 min, 4° C. Collect 1 ml supernatant (SN).
[0944] 5) Mix 1 ml supernatant from step 4 with 1 ml of 2×PBS 6 mM MgCl₃, collect 400 ul into 3 tubes (replicates A, B, C) and use it in step 6.
[0945] 6) Add competitor per Table 13: make dilutions in 1×PBS, 3 mM MgCl₂, mix well, pour into trough, pipet using multichannel.

TABLE 13
Competitors

| | | | | | Volume from | | | |
|---|---|---|---|---|---|---|---|---|
| | | | Intermediate | | stock to make | Buffer to make | Final | |
| | Type of | Stock | stock | Number of | intermediate | intermediate | Volume, | Final |
| units | Competitor | Concentration | concentration | samples | stock, ul | stock | ul | Concentration |
| ng/ul | Salmon DNA | — | 40 | — | — | — | 425.5 | 0.8 |
| ng/ul | tRNA | — | 40 | — | — | — | 425.5 | 0.8 |
| x | S1 | 20 | 0.5 | 280 | 65.5 | 2555.6 | 425.5 | 0.01 |

[0946] 7) Incubate for 10 min, RT, end-over-end rotation

[0947] Pool of 6-3S and 8-3S oligonucleotide probing libraries is ready: 2.76 ng/ul (185 ng). Save pool stock and dilutions. New pool can be made by mixing 171.2 ul (500 ng) of library 6-3S (2.92 ng/ul) with 190.8 ul (500 ng) of library 8-3S (2.62 ng/ul). Aliquot pooled library into 30 ul and store at −80 C.

[0948] Add ssDNA oligonucleotide probing library to the final concentration 2.5 pg/ul for binding. Make dilutions in 1×PBS, 3 mM MgCl₂.

TABLE 14
Probe library calculations

| | | Required | ul from | | | | Volume | |
|---|---|---|---|---|---|---|---|---|
| Original | | working | original | ul of | | | per sample | Final |
| stock, | Lib | stock | stock to | buffer to | Final | Number of | from working | concentration |
| ng/ul | Name | (ng/ul) | make working | make working | volume, ul | samples | stock | (pg/ul) |
| 2.76 | Pooled | 0.1 | 26.1 | 694.1 | 720.2 | 60 | 10.9 | 2.5 |
| | library | | | | | | | |
| | 6-3S/8-3S | | | | | | | |

[0949] 8) Binding: Incubate for Ili at RT with rotation.
[0950] 9) Prepare polymer solution: 20% PEG8000 in 1×PBS 3 mM MgCl2 (dilute 40% PEG8000 with 2×PBS with 6 mM MgCl2). Add 20% PEG8000 to sample to the final concentration 6%. Invert few times to mix, incubate for 15 min at 4C

TABLE 15
PEG calculations

| | | | | | Volume of | | | |
|---|---|---|---|---|---|---|---|---|
| | | | | Volume | buffer to | Sample | | Total |
| PEG | PEG | Final | Final | 20% PEG | adjust final | volume before | Total | 20% PEG |
| MW | stock, % | conc., % | volume, ul | to add, ul | volume, ul | adding PEG | samples | needed, ml |
| 8000 | 20 | 6 | 622.8 | 186.9 | −0.4 | 436.4 | 60 | 11.2 |

[0951] 10) Spin at 10,000×g for 5 min, RT.
[0952] 11) Remove SN, add 1 ml 1×PBS, 3 mM MgCl2 and wash pellet by gentle invertion with 1 ml aptamer buffer.
[0953] 12) Remove buffer, Re-suspend pellets in 100 ul H2O: incubate at RT for 10 min on mixmate 900 rpm to re-suspend.
[0954] 13) Make sure each sample is re-suspended by pipetting after step 13. Make notes on hardly re-suspendable samples.

[0955] 14) 50 ul of re-suspended sample to indexing PCR->next generation sequencing (NGS).

[0956] 15) Keep leftover at 4C

### Technical Validation:

[0957] The current protocol was tested versus a protocol using 8% PEG8000 to precipitate microvesicles. The current protocol further comprises steps to reduce dsDNA in the oligonucleotide probing libraries.

[0958] FIG. 12A shows the within sample variance (black) between binding replicates and the between sample variance (grey). Black is on top of grey, thus any observable grey oligo is informative about differences in the biology of two patient samples. This evaluation of Sources of Variance shows that the technical variances is significantly smaller than the biological variance.

[0959] FIG. 12B shows the impact of using a higher proportion of single stranded DNA and PEG 6% isolation (white bars) compared to when there is a higher amount of double stranded DNA and 8% PEG (grey). This data indicates that the protocol in this Example improves biological separation between patients.

[0960] The plots in FIG. 12C show the difference between an earlier protocol (PEG 8% with increased dsDNA) and a modified protocol of the Example (PEG 6% no dsDNA). The black is the scatter between replicates (independent binding events) and the grey is the difference between patients. This data shows that the signal to noise increased significantly using the newer protocol.

### Patient Testing:

[0961] The protocol above was used to test patient samples having the following characteristics:

TABLE 16
Patient characteristics

| Sample Type | Description |
|---|---|
| Cancer | Mixed type carcinoma; Malignant; |
| Cancer | Invasive, predominant intraductal component (8500/3) |
| Cancer | Fibrocystic Changes; Invasive lobular carcinoma - 8520/3; Lobular carcinoma in |
| | situ - 8520/2; Benign; In situ and grade 3 intraepith; Malignant; Fat necrosis, |
| | periductal inflammation, malignant cellsFat necrosis; Inflammation; Benign; |
| Cancer | Invasive, predominant intraductal component (8500/3) |
| Cancer | Mucinous (colloid) adenocarcinoma (8480/3) |
| Cancer | Invasive lobular carcinoma - 8520/3; Microcalcifications; Benign; Malignant; |
| Cancer | Otherfibrocystic changeInvasive, NOS (8500/3) |
| Cancer | Invasive ductal carcinoma, not otherwise specified (NOS) - 8500/3; Malignant; |
| Cancer | Invasive ductal carcinoma, not otherwise specified (NOS) - 8500/3; Malignant; |
| Cancer | Intraductal carcinoma, non-infiltrating, NOS (in situ) (8500/2) |
| Cancer | Atypical lobular hyperplasia |
| | Otherfibrocystic changes, inter and intralobular fibrosis, apocrine metaplasia, |
| | columnar cell change, microcalcificationsInvasive, NOS (8500/3) |
| Cancer | FibroadenomaInvasive, NOS (8500/3) |
| Cancer | Ductal carcinoma in situ - 8500/2; Invasive ductal carcinoma, not otherwise |
| | specified (NOS) - 8500/3; Microcalcifications; Benign; In situ and grade 3 |
| | intraepith; Malignant; |
| Cancer | Ductal carcinoma in situ - 8500/2; Invasive lobular carcinoma - 8520/3; Lobular |
| | carcinoma in situ - 8520/2; In situ and grade 3 intraepith; Malignant; |
| Cancer | Ductal carcinoma in situ - 8500/2; Invasive ductal carcinoma, not otherwise |
| | specified (NOS) - 8500/3; Microcalcifications; Benign; In situ and grade 3 |
| | intraepith; Malignant; Focal Micropapillary Features, invasive ductal carcinoma |
| | with micropapillary features, invasive ductal carcinoma with mucinous and |
| | micropapillary featInvasive ductal carcinoma with micropapillary and mucinous |
| | features; Invasive micropapillary carcinoma - 8507/3; Malignant; |
| Cancer | Invasive, predominant intraductal component (8500/3) |
| Cancer | Invasive ductal carcinoma, not otherwise specified (NOS) - 8500/3; Malignant; |
| Cancer | Invasive, NOS (8500/3) |
| Cancer | Infiltrating duct and lobular carcinoma (8522/3) |
| Cancer | Invasive, predominant in situ component (8520/3) |
| Non-Cancer | Otherusual ductal hyperplasia, apocrine metaplasia, microcysts, elastosis |
| Non-Cancer | Otherstromal fibrosis, fibrous cyst wall |
| Non-Cancer | Otherfibrocystic change, stromal fibrosis, cyst formation, microcalcifications, |
| | apocrine metaplasia, sclerosing adenosis, usual ductal hyperplasia |
| Non-Cancer | Otherfibrocystic changes, apocrine metaplasia, cystic change, usual ductal |
| | hyperplasia |
| Non-Cancer | Otherfibrocystic change, microcalcifications |
| Non-Cancer | Fibroadenoma |
| Non-Cancer | Otherintraductal papilloma, sclerosis, microcalcifications, stromal fibrosis |
| Non-Cancer | Fibroadenoma |
| Non-Cancer | Otherfat necrosis |
| Non-Cancer | Otherstromal fibrosis, microcalcifications |
| Non-Cancer | Otherfibrocystic change, microcystic change, focal secretory features |
| Non-Cancer | Otherstromal fibrosis |
| Non-Cancer | Fibroadenoma Otheradenosis, columnar cell change/hyperplasia, usual ductal |
| | hyperplasia |
| Non-Cancer | OtherFNA - insufficient material for diagnosis |
| Non-Cancer | Otherintraductal papilloma |
| Non-Cancer | Otherfibrocystic changes, duct ectasia, usual ductal hyperplasia, apocrine |
| | metaplasia, microcalcifications |

[0962] Microvesicles (and potentially other biological entities) were precipitated in blood (plasma) samples from the above patients using polymer precipitation with PEG as indicated above. The protocol was used to probe the samples with the oligonucleotide probe libraries. Sequences that bound the PEG precipitated samples were identified using next generation sequencing (NGS).

[0963] FIG. 12D shows scatter plots of a selection of results from testing the 40 patients listed previously. The spread in the data indicates that large numbers of oligos were detected that differed between samples. The number of significant oligos found is much greater than would be expected randomly as shown in Table 17. The table shows the number of oligonucleotides sorted by copy number detected and p-value. The d-# indicates the number copies of a sequence observed for the data in the rows.

TABLE 17
Expected versus observed sequences

| | Total Number | P-0.1 | P-0.05 | P-0.01 | P-0.005 |
|---|---|---|---|---|---|
| d-50 | 83,632 | 47,020 | 30,843 | 5,934 | 2,471 |
| d-100 | 52,647 | 29,106 | 19,446 | 3,893 | 1,615 |
| d-200 | 28,753 | 14,681 | 9,880 | 2,189 | 914 |
| d-500 | 10,155 | 4,342 | 2,927 | 725 | 315 |
| d-50 | 100.0% | 56.2% | 36.9% | 7.1% | 3.0% |
| d-100 | 100.0% | 55.3% | 36.9% | 7.4% | 3.1% |
| d-200 | 100.0% | 51.1% | 34.4% | 7.6% | 3.2% |
| d-500 | 100.0% | 42.8% | 28.8% | 7.1% | 3.1% |

| | | | | |
|---|---|---|---|---|
| Maximum expected | 10.0% | 5.0% | 1.0% | 0.5% |

[0964] As a control, the cancer and non-cancer samples were randomly divided into two groups. Such randomization of the samples significantly reduced the number of oligos found that differentiate between sample groups. Indeed, there was a 50-fold increase in informative oligos between the cancer/non-cancer grouping versus random grouping. FIG. 12E shows data as in Table 17 and indicates the number of observed informative oligos between the indicated sample groups.

[0965] FIG. 12F shows distinct groups of oligos that differentiate between cancer and non-cancer samples. The figure shows a heatmap of the 40 samples tested with oligos selected that had more than 500 copies and p-value less than 0.005. There are clear subpopulations emerging with a distinct non-cancer cohort at the top. The non-cancer samples have boxes around them on the left axis. FIG. 12G is similar and shows results with an additional 20 cancer and 20 non-cancer samples. As shown, analysis with the 80 samples provides the emergence of more distinct and larger clusters.

[0966] The data for the additional 80 samples was also used to compare the consistency of informative oligos identified in different screening experiments. Of the 315 informative oligos identified using the first set of 40 patients, 86% of them showed fold-change in a consistent manner when tested on the independent set of 40 patients.

### Example 22: Enrichment of Oligonucleotide Probes to Breast Cancer (BrCα) and Non-BrCa Derived Microvesicles Using a Balanced Library Design

[0967] In this Example, a naïve ADAPT oligonucleotide library was screened to enrich oligonucleotides that identify microvesicles circulating in the blood of breast cancer patients and microvesicles circulating in the blood of healthy, control individuals (i.e., without breast cancer). The input library was the naïve F-TRin-35n-B 8-3s library, which comprises a 5′ region (5′ CTAGCATGACTGCAGTACGT (SEQ ID NO. 131)) followed by the random naïve aptamer sequences of 35 nucleotides and a 3′ region (5′ CTGTCTCTTATACACATCTGACGCTGCCGACGA (SEQ ID NO. 132)). The “balanced” design is described in Example 23 of Int'l Patent Publication WO/2015/031694 (Appl. No. PCT/US2014/053306, filed Aug. 28, 2014). The working library comprised approximately 2×10¹³ synthetic oligonucleotide sequences. The naïve library may be referred to as the “L0 Library” herein.

[0968] The L0 Library was enriched against fractionated plasma samples from breast cancer patients and from healthy (non-breast cancer) controls using the protocol shown in FIG. 21A. In Step 1, an aliquot of approximately 10¹¹ sequences of PCR-amplified L0 was incubated with pooled blood-plasma from 59 breast cancer patients with positive biopsy (represented by “Source A” in FIG. 21A). In parallel, another aliquot of 10¹¹ sequences was incubated with pooled blood-plasma from 30 patients with suspected breast cancer who proved negative on biopsy and 30 self declared healthy women (represented by “Source B” in FIG. 21A). In Step 2, microvesicles (extracellular vesicles, “EV”) were precipitated using ultracentrifugation (UC) from both L0-samples. The EV-associated oligodeoxynucleotides (ODNs) were recovered from the respective pellets. In Step 3, a counter-selection step (Step 3) was carried out by incubation of each enriched library with plasma from the different cohorts to drive the selection pressure towards enrichment of ODNs specifically associated with each sample cohort. In this step, sequences contained in the EV pellets were discarded. In Step 4, a second positive selection was performed. In this step, the sequences contained in the respective supernatants (sn) from Step 3 were mixed with plasma from another aliquot of each positive control sample-population, and EVs were again isolated. EV-associated ODNs were recovered, representing two single-round libraries called library L1 for positive enrichment of cancer (positive biopsy) patients, and library L2 for the positive enrichment against control patients. In a final step, L1 and L2 were amplified by PCR, reverted to single stranded DNA (ssDNA), and mixed to yield library L3.

[0969] This enrichment scheme was iterated two times more using L3 as the input to further reduce the complexity of the profiling library to approximately 10⁶ different sequences. In Step 2, UC was used for partitioning of microvesicles, which may increase the specificity for the EV fraction. In Steps 3 and 4, partitioning was performed using PEG-precipitation. This procedure enriches for ODNs specific for each biological source. Library L3 contains those ODNs that are associated with targets characteristic for EV-populations from both sources, i.e. ODNs acting as aptamers that bind to molecules preferentially expressed in each source. A total of biopsy-positive (n=59), biopsy-negative (n=30), and self-declared normal (n=30) were used in the first round of L3 enrichment, while only the cancer and non-cancer samples were used in the subsequent rounds.

[0970] The enriched libraries were characterized using next-generation-sequencing (NGS) to measure copy numbers of sequences contained in each profiling library. NGS of L0 shows that the vast majority of sequences existed in low copy numbers, whereas libraries L1 and L2 showed significantly higher average counts per sequence (FIG. 21B) and a reduced amount of different sequences, with unaltered total valid reads, (FIG. 21C) consistent with an enrichment process.

### Example 23: Analysis of ADAPT-Identified Biomarkers

[0971] As described herein, e.g., in the section entitled “Aptamer Target Identification,” an unknown target recognized by an aptamer can be identified. In this Example, an oligonucleotide probe library (also referred to as Adaptive Dynamic Artificial Poly-ligand Targeting (ADAPT) libraries or Topographical Oligonucleotide Probe “TOP” libraries) was developed as described here and targets of the screened oligonucleotides were determined. This Example used a ADAPT library generated by enriching microvesicles collected from the blood of breast cancer patients and normal controls (i.e., non-cancer individuals). The enrichment protocols are described herein in Example 22.

### Materials & Methods

### SBED Library Conjugation

[0972] A naïve F-TRin-35n-B 8-3s library was enriched against microvesicles from normal female plasma. The naïve unenriched library comprised a 5′ region (5′ CTAGCATGACTGCAGTACGT (SEQ ID NO. 131)) followed by the random naïve aptamer sequences of 35 nucleotides and a 3′ region (5′ CTGTCTCTTATACACATCTGACGCTGCCGACGA (SEQ ID NO. 132)). The naïve library may be referred to as the “L0 Library” herein and the enriched library referred to as the “L2 library.” See Example 22. The screened library was PCR amplified with a C6-amine sense primer (C6 Amine-5′ CTAGCATGACTGCAGTACGT 3′ (SEQ ID NO. 131)) and a 5′ phosphorylated anti-sense primer (5′ Phos TCGTCGGCAGCGTCA (SEQ ID NO. 133)), the purified product was strand separated and conjugated with sulfo-SBED (Thermo Scientific) according to Vinkenborg et al. (Angew Chem Int Ed Engl. 2012, 51:9176-80) with the following modifications: The reaction was scaled down to 5 μg C6-amine DNA library (8.6 μM) in 25 mM HEPES-KOH, 0.1M NaCl, pH 8.3 and incubated with either 100-fold molar excess of sulfo-SBED or DMSO in a 21 μL volume for 30 min at room temp in the dark. The SBED-conjugated library was immediately separated from the unconjugated library and free sulfo-SBED by injection onto a Waters X-Bridge™ OST C-18 column (4.6 mm×50 mm) and fractionated by HPLC (Agilent 1260 Infinity) with a linear gradient Buffer A: 100 mM TEAA, pH7.0, 0% ACN to 100 mM TEAA, pH7.0, 25% ACN at 0.2 ml/min, 65° C. There SBED-conjugated fractions were desalted into water with Glen Gel-Pak™ Cartridges and concentrated by speed-vac. SBED conjugation was confirmed by LC-MS and/or a dot blot with streptavidin-HRP detection.

### Binding Reaction and Cross-Linking

[0973] SBED library functionalization was tested by performing the ADAPT assay with SBED vs DMSO mock conjugated control C6-amine library and sequenced on a HiSeq 2500™ (Illumina Corp.). The aptamer precipitation was performed with forty-eight ADAPT reactions incubated for 1 hr with end-over-end rotation at room temp with a 5 ng input of SBED conjugated library per 200 μL of plasma (pre-spun to remove cellular debris at 10,000×g for 20 min, 4° C.) in 1×PBS, 3 mM MgCl₂, 0.01 mM dextran sulfate, 40 ng/μl salmon sperm DNA and 40 ng/μl yeast transfer RNA, and cOmplete ULTRA Mini EDTA-free™ protease inhibitors (Roche) equivalent to ˜240 ng library and 9.6 mls plasma. A duplicate set of 48 reactions was prepared with the DMSO control C6-amine library. Aptamer library-protein complexes were precipitated with incubation in 6% PEG8000 for 15 min at 4° C. then centrifuged at 10,000×g for 5 min. Pellets were washed with 1 ml 1×PBS, 3 mM MgCl2 by gentle inversion to remove unbound aptamers. The washed pellets were resuspended in 100 μL of water and subjected to photo-cross-linking at 365 nm with a hand-held 3UV (254 NM/302 NM/365 NM) lamp, 115 volts (Thermo Scientific) for 10 min on ice with 1-2 cm between the 96-well plate and lamp.

### Oligonucleotide Precipitation

[0974] Cross-linked reactions were subsequently pooled (˜4.8 ml) per library or 4.8 ml of 1×PBS (AP bead only control) and incubated with 10 μL of Prepared Dynabeads® MyOne™ Streptavidin C1 (10 mg/ml) (Life Technologies) (pre-washed with 1×PBS, 0.01% Triton X-100) shaking for 1 hr at room temp. Beads were transferred to an eppendorf tube and lysed for 20 min with lysis buffer (50 mM Tris-HCl, 10 mM MgCl2, 200 mM NaCl, 0.5% Triton X-100, 5% glycerol, pH 7.5) on ice, washed 3 times with wash buffer 1 (10 mM Tris-HCl, 1 mM EDTA, 2M NaCl, 1% Triton X-100), followed by 2 times with wash buffer 2 (10 mM Tris-HCl, 1 mM EDTA, 2M NaCl, 0.01% Triton X-100) as described by Vinkenborg et al. (Angew Chem Int Ed Engl. 2012, 51:9176-80). Cross-linked proteins were eluted by boiling 15 min in 1×LDS sample buffer with reducing agent added (Life Technologies) and loaded on a 4-12% SDS-PAGE gradient gel (Life Technology). Proteins and DNA were detected with double staining with Imperial Blue Protein Stain (Thermo Scientific) followed by Prot-SIL2™ silver stain kit (Sigma) used according to manufacturer's instructions in order to enhance sensitivity and reduce background.

### Protein Identification

[0975] Protein bands that appeared to differ between the cancer and normal were excised from the gradient gels and subjected to liquid chromatography-tandem mass spectrometry (LC-MS/MS).

### Results

[0976] ADAPT protein targets were identified from bands cut from a silver stained SDS-PAGE gel (FIG. 13). Aptamer-SBED protein complexes (lane 3) or Aptamer-DMSO protein complexes (control-lane 4) were precipitated with 6% PEG8000, subjected to UV photo-cross-linking, and pulled-down with Streptavidin coated beads. Eluate was analyzed under reducing conditions by SDS-PAGE and silver staining. Aptamer library alone (5 ng) (lane 1) was loaded as a control for migration of the library (second to bottom arrows) and an equal volume of eluate from a bead only sample (lane 4) was loaded as a streptavidin control to control for potential leaching of the streptavidin monomer (bottom arrow) under the harsh elution conditions. Upper arrows (“Targets”) indicate specific or more predominant bands identified with the SBED-conjugated library vs. the mock DMSO treated control C6-amine library. Indicated target protein bands were cut out and sent for LC-MS/MS protein identification or indicated DNA library bands were eluted, reamplified and sequenced. The identified proteins are those that appeared as upregulated in the normal samples.

[0977] Tables 18-25 list human proteins that were identified in 8 bands excised from the silver stained gel. In all tables the proteins are those identified in the oligo-SBED protein complexes with proteins identified in the corresponding control lanes removed. The band numbers in the tables indicate different bands cut from the gel (FIG. 13). Accession numbers in the table are from the UniProt database (www.uniprot.org). “GN=” is followed by the gene name. Various protein classifications indicated in the Tables 18-25 include Nucleic Acid Binding Proteins (NAB), Tumor suppressors (TS), cell adhesion/cytoskeletal (CA/CK) and abundant plasma proteins (ABP). In Table 18, the proteins listed below the row “SBED associated” were identified by peptide fragments linked to SBED, indicating that the peptides are from near the cross-linking sites. Class is not reported for these proteins.

TABLE 18
Band 3

| Accession | | |
|---|---|---|
| number | Class | Protein name |
| P02538 | CA/CK | Keratin, type II cytoskeletal 6A GN = KRT6A |
| P15924 | CA/CK | Desmoplakin GN = DSP |
| P04259 | CA/CK | Keratin, type II cytoskeletal 6B GN = KRT6B |
| P60709 | CA/CK | Actin, cytoplasmic 1 GN = ACTB |
| P20930 | CA/CK | Filaggrin GN = FLG |
| P07476 | CA/CK | Involucrin GN = IVL |
| P31947 | TS | 14-3-3 protein sigma GN = SFN |
| Q7Z794 | CA/CK | Keratin, type II cytoskeletal 1b GN = KRT77 |
| P02545 | NAB | Prelamin-A/C GN = LMNA |
| P19012 | CA/CK | Keratin, type I cytoskeletal 15 GN = KRT15 |
| P47929 | CA/CK | Galectin-7 GN = LGALS7 |
| | & TS | |
| P11142 | | Heat shock cognate 71 kDa protein GN = HSPA8 |
| P58107 | NAB | Epiplakin GN = EPPK1 |
| P08107 | | Heat shock 70 kDa protein 1A/1B GN = HSPA1A |
| Q02413 | CA/CK | Desmoglein-1 GN = DSG1 |
| P06396 | CA/CK | Gelsolin GN = GSN |
| O60814 | NAB | Histone H2B type 1-K GN = HIST1H2BK |
| P68104 | NAB | Elongation factor 1-alpha 1 GN = EEF1A1 |
| P05387 | NAB | 60S acidic ribosomal protein P2 GN = RPLP2 |
| Q7RTS7 | CA/CK | Keratin, type II cytoskeletal 74 GN = KRT74 |
| P31946 | TS | 14-3-3 protein beta/alpha GN = YWHAB |
| Q13835 | CA/CK | Plakophilin-1 GN = PKP1 |
| P14923 | CA/CK | Junction plakoglobin GN = JUP |
| P09651 | NAB | Heterogeneous nuclear ribonucleoprotein A1 GN = HNRNPA1 |
| P07900 | | Heat shock protein HSP 90-alpha GN = HSP90AA1 |
| Q96KK5 | NAB | Histone H2A type 1-H GN = HIST1H2AH |
| P04406- | CA/CK | Glyceraldehyde-3-phosphate dehydrogenase GN = GAPDH |
| P10412 | NAB | Histone H1.4 GN = HIST1H1E |
| P04792 | | Heat shock protein beta-1 GN = HSPB1 |
| Q9NZT1 | | Calmodulin-like protein 5 GN = CALML5 |
| P81605 | | Dermcidin GN = DCD |
| P27348 | TS | 14-3-3 protein theta GN = YWHAQ |
| P55072 | NAB | Transitional endoplasmic reticulum ATPase GN = VCP |
| Q09666 | NAB | Neuroblast differentiation-associated protein AHNAK GN = AHNAK |
| P23246 | NAB | Splicing factor, proline- and glutamine-rich GN = SFPQ |
| Q15149 | CA/CK | Plectin GN = PLEC |
| Q8NC51 | NAB | Plasminogen activator inhibitor 1 RNA-binding protein GN = SERBP1 |
| P07237 | | Protein disulfide-isomerase GN = P4HB |
| O60437 | CA/CK | Periplakin GN = PPL |
| P01717 | ABP | Ig lambda chain V-IV region Hil |
| P55884 | NAB | Eukaryotic translation initiation factor 3 subunit B GN = EIF3B |
| P11021 | | 78 kDa glucose-regulated protein GN = HSPA5 |
| P01024 | | Complement C3 GN = C3 |
| P04350 | CA/CK | Tubulin beta-4A chain GN = TUBB4A |
| P01857 | ABP | Ig gamma-1 chain C region GN = IGHG1 |
| P61247 | NAB | 40S ribosomal protein S3a GN = RPS3A |
| P62937 | | Peptidyl-prolyl cis-trans isomerase A GN = PPIA |
| O15020 | CA/CK | Spectrin beta chain, non-erythrocytic 2 GN = SPTBN2 |
| P30101 | | Protein disulfide-isomerase A3 GN = PDIA3 |
| Q6KB66 | CA/CK | Keratin, type II cytoskeletal 80 GN = KRT80 |
| Q9UJU6 | CA/CK | Drebrin-like protein GN = DBNL |
| P47914 | NAB | 60S ribosomal protein L29 GN = RPL29 |
| P39023 | NAB | 60S ribosomal protein L3 GN = RPL3 |
| A6NMY6 | CA/CK | Putative annexin A2-like protein GN = ANXA2P2 |
| P60174 | CA/CK | Triosephosphate isomerase GN = TPI1 |
| P35241 | CA/CK | Radixin GN = RDX |
| P07305 | NAB | Histone H1.0 GN = H1F0 |
| P15259 | CA/CK | Phosphoglycerate mutase 2 GN = PGAM2 |
| P0CG05 | ABP | Ig lambda-2 chain C regions GN = IGLC2 |
| Q92817 | CA/CK | Envoplakin GN = EVPL |
| P06733 | NAB | MBP-1 of Alpha-enolase GN = ENO1 |
| P22626 | NAB | Heterogeneous nuclear ribonucleoproteins A2/B1 GN = HNRNPA2B1 |
| P62424 | NAB | 60S ribosomal protein L7a GN = RPL7A |
| P60660 | CA/CK | Myosin light polypeptide 6 GN = MYL6 |
| P04083 | NAB | Annexin A1 GN = ANXA1 |
| Q14134 | NAB | Tripartite motif-containing protein 29 GN = TRIM29 |
| P39019 | NAB | 40S ribosomal protein S19 GN = RPS19 |
| Q8WVV4 | CA/CK | Protein POF1B GN = POF1B |
| Q02878 | NAB | 60S ribosomal protein L6 GN = RPL6 |
| Q9Y6X9 | NAB | MORC family CW-type zinc finger protein 2 GN = MORC2 |
| Q9NQC3 | NAB | Reticulon-4 GN = RTN4 |
| Q5T753 | CA/CK | Late cornified envelope protein 1E GN = CA/CK E |

SBED associated

| | |
|---|---|
| P56202 | Cathepsin W |
| P80188 | Neutrophil gelatinase-associated lipocalin precursor |
| Q13017 | Rho GTPase-activating protein 5 |
| Q6UB98 | Ankyrin repeat domain-containing protein 12 |
| P54753 | Ephrin type-B receptor 3 |
| Q5JRS4 | Olfactory receptor 10J3 |
| P82279 | Protein crumbs homolog 1 |
| O00763 | Acetyl-CoA carboxylase 2 |
| P02533; | Keratin, type 1 cytoskeletal 14, 16 |
| P08779 | |
| P26012 | Integrin beta-8 |
| Q14766 | Latent-transforming growth factor beta-binding protein 1 |

TABLE 19
Band 9

| Accession | | |
|---|---|---|
| number | Class | Protein name |
| P61626 | | Lysozyme C GN = LYZ |
| Q9HCK1 | NAB | DBF4-type zinc finger-containing protein |
| | | 2 GN = ZDBF2 |

TABLE 20
Band 1

| Accession | | |
|---|---|---|
| number | Class | Protein name |
| P01834 | ABP | Ig kappa chain C region GN = IGKC |
| P01765 | ABP | Ig heavy chain V-III region TIL |
| P04003 | NAB | C4b-binding protein alpha chain GN = C4BPA |
| P60709 | CA/CK | Actin, cytoplasmic 1 GN = ACTB |
| Q5T751 | CA/CK | Late cornified envelope protein 1C GN = LCE1C |

TABLE 21
Band 5

| Accession | | |
|---|---|---|
| number | Class | Protein name |
| P01860 | ABP | Ig gamma-3 chain C region GN = IGHG3 |
| O60902 | NAB | Short stature homeobox protein 2 GN = SHOX2 |

TABLE 22
Band 7

| Accession | | |
|---|---|---|
| number | Class | Protein name |
| Q04695 | CA/CK | Keratin, type I cytoskeletal 17 GN = KRT17 |
| Q7Z794 | CA/CK | Keratin, type II cytoskeletal 1b GN = KRT77 |
| Q6KB66 | CA/CK | Keratin, type II cytoskeletal 80 GN = KRT80 |
| P01833 | | Polymeric immunoglobulin receptor GN = PIGR |
| P01042 | | Kininogen-1 GN = KNG1 |
| Q02413 | CA/CK | Desmoglein-1 GN = DSG1 |
| P15924 | CA/CK | Desmoplakin GN = DSP |
| Q8TF72 | | Protein Shroom3 GN = SHROOM3 |
| P02671 | ABP | Fibrinogen alpha chain GN = FGA |
| Q5T749 | CA/CK | Keratinocyte proline-rich protein GN = KPRP |
| Q5VZP5 | | Inactive dual specificity phosphatase 27 |
| | | GN = DUSP27 |
| Q5T751 | CA/CK | Late cornified envelope protein 1C GN = LCE1C |
| Q9UL12 | | Sarcosine dehydrogenase, mitochondrial |
| | | GN = SARDH |
| P00698 | | Lysozyme C OS = Gallus gallus GN = LYZ |
| Q8N114 | | Protein shisa-5 GN = SHISA5 |

TABLE 23
Band 15

| Accession | | |
|---|---|---|
| number | Class | Protein name |
| P08238 | | Heat shock protein HSP 90-beta GN = HSP90AB1 |
| P68104 | NAB | Elongation factor 1-alpha 1 GN = EEF1A1 |
| P02675 | ABP | Fibrinogen beta chain GN = FGB |
| Q8TF72 | | Protein Shroom3 GN = SHROOM3 |
| P0CG05 | ABP | Ig lambda-2 chain C regions GN = IGLC2 |
| P78386 | CA/CK | Keratin, type II cuticular Hb5 GN = KRT85 |
| Q7Z5Y6 | | Bone morphogenetic protein 8A GN = BMP8A |
| O14633 | CA/CK | Late cornified envelope protein 2B GN = LCE2B |

TABLE 24
Band 17

| Accession | | |
|---|---|---|
| number | Class | Protein name |
| P02538 | CA/CK | Keratin, type II cytoskeletal 6A GN = KRT6A |
| P01834 | ABP | Ig kappa chain C region GN = IGKC |
| P06702 | | Protein S100-A9 GN = S100A9 |
| P68104 | NAB | Elongation factor 1-alpha 1 GN = EEF1A1 |
| P01024 | | Complement C3 GN = C3 |
| P81605 | | Dermcidin GN = DCD |
| P05109 | | Protein S100-A8 GN = S100A8 |
| Q5T751 | CA/CK | Late cornified envelope protein 1C GN = LCE1C |

TABLE 25
Band 19

| Accession | | |
|---|---|---|
| number | Class | Protein name |
| P02768 | NAB | Serum albumin GN = ALB |
| P0CG05 | ABP | Ig lambda-2 chain C regions GN = IGLC2 |
| P06702 | | Protein S100-A9 GN = S100A9 |
| P08238 | | Heat shock protein HSP 90-beta GN = HSP90AB1 |
| P60709 | CA/CK | Actin, cytoplasmic 1 GN = ACTB |
| P13647 | CA/CK | Keratin, type II cytoskeletal 5 GN = KRT5 |
| P01616 | ABP | Ig kappa chain V-II region MIL |
| Q86YZ3 | CA/CK | Hornerin GN = HRNR |
| P01857 | ABP | Ig gamma-1 chain C region GN = IGHG1 |
| P62805 | NAB | Histone H4 GN = HIST1H4A |
| P59665 | | Neutrophil defensin 1 GN = DEFA1 |
| P61626 | | Lysozyme C GN = LYZ |
| P01024 | ABP | Complement C3 GN = C3 |
| Q8TF72 | | Protein Shroom3 GN = SHROOM3 |
| P83593 | ABP | Ig kappa chain V-IV region STH (Fragment) |
| P01700 | ABP | Ig lambda chain V-I region HA |
| P01877 | ABP | Ig alpha-2 chain C region GN = IGHA2 |
| Q9UL12 | | Sarcosine dehydrogenase, mitochondrial |
| | | GN = SARDH |
| Q6NXT2 | NAB | Histone H3.3C GN = H3F3C |
| P02788 | NAB | Lactotransferrin GN = LTF |
| P02787 | ABP | Serotransferrin GN = TF |

[0978] Certain proteins were identified in multiple bands. For example, IGLC2 was identified in bands 3, 15 and 19 and SHROOM3 was identified in bands 7, 15, 19. This may be due to degradation products, isoforms or the like. These experiments identified 108 proteins (plus 2 lysozyme controls), comprising among others 34 Nucleic Acid Binding Proteins (NAB) where 7 of the 34 are putative tumor suppressors/repressors; 37 cell adhesion/cytoskeletal (CA/CK); and 14 abundant plasma proteins (ABP). All of the tumor suppressors/repressors are DNA/RNA binding proteins. Other proteins comprise chaperones, signaling molecules etc.

[0979] For comparison to the above pull-down results with the enriched L2 library, mass spectrometry was used to identify proteins in whole plasma samples (“neat plasma”) (Table 26, row “Neat”), in PEG enriched plasma fractions (comprising a microvesicle-containing fraction) (Table 26, row “PEG”), and in unenriched L0 library pull-down (Table 26, row “Unenriched”) using the same healthy (non-breast cancer) plasma samples as described above (column “Plasma,” rows “Non-cancer” in the table). Descriptions in the table comprise the gene name followed by accession numbers from the UniProt database (www.uniprot.org) in parentheses. 81 proteins were pulled down by L2 (Tables 18-25) that were not detectable in the PEG-precipitated and neat plasma, indicating that these proteins became enriched due to their interaction with L2 oligonucleotide probes. Further details are found in Example 28 of International Patent Application PCT/US15/62184, filed Nov. 23, 2015, which application is incorporated by reference herein in its entirety. The methods above were further repeated to identify proteins that were identified in cancer samples using pull-down with the L1 library (column “Plasma,” rows “Cancer” in the table). With the proteins identified in the cancer plasma samples, the row “Non-SBED”and “SBED refer to proteins identified by peptide fragments that were unassociated with or associated with SBED, respectively.

TABLE 26
Proteins identified in plasma

| Plasma | Accession | Description (Gene Name (Accession)) |
|---|---|---|
| Non- | Neat | ALB (P02768), C3 (P01024), APOB (P04114), TF (P02787), A2M (P01023), C4B |
| cancer | | (P0C0L5), C4A (P0C0L4), FGA (P02671), FGB (P02675), CP (P00450), IGKC (P01834), |
| | | IGHG1 (P01857), HP (P00738), FGG (P02679), IGHG3 (P01860), CFH (P08603), GC |
| | | (P02774), IGHG2 (P01859), SERPINA1 (P01009), ITIH4 (Q14624), SERPINC1 (P01008), |
| | | IGHM (P01871), HPR (P00739), CFB (P00751), APOA1 (P02647), FN1 (P02751), IGLL5 |
| | | (B9A064), PLG (P00747), A1BG (P04217), ITIH2 (P19823), SERPINA3 (P01011), KNG1 |
| | | (P01042), IGHG4 (P01861), APOA4 (P06727), F2 (P00734), HPX (P02790), C4BPA |
| | | (P04003), ITIH1 (P19827), IGHA1 (P01876), IGLC2 (P0CG05), SERPING1 (P05155), |
| | | GSN (P06396), PON1 (P27169), AGT (P01019), APOH (P02749), HRG (P04196), APCS |
| | | (P02743), AFM (P43652), IGHA2 (P01877), APOE (P02649), AHSG (P02765), |
| | | SERPIND1 (P05546), C5 (P01031), AMBP (P02760), ORM1 (P02763), AZGP1 (P25311), |
| | | KRT1 (P04264), CFI (P05156), HBB (P68871), CD5L (O43866), C9 (P02748), RBP4 |
| | | (P02753), VTN (P04004), SERPINA6 (P08185), SERPINF2 (P08697), CLU (P10909), |
| | | KRT2 (P35908), C1QC (P02747), TTR (P02766), Ig kappa chain V-II region TEW |
| | | (P01617), Ig heavy chain V-III region BUT (P01767), Ig heavy chain V-III region TUR |
| | | (P01779), APOA2 (P02652), ORM2 (P19652), CFHR1 (Q03591), PGLYRP2 (Q96PD5), |
| | | LYZ (P00698), Ig kappa chain V-IV region Len (P01625), Ig heavy chain V-III region |
| | | GAL (P01781), IGHD (P01880), C1QB (P02746), C8A (P07357), C8G (P07360), KRT10 |
| | | (P13645), APOL1 (O14791), IGJ (P01591), KLKB1 (P03952), Ig lambda chain V region |
| | | 4A (P0421 1), Ig kappa chain V-III region VG (Fragment) (P04433), HBA1 (P69905), |
| | | APOM (O95445), C1R (P00736), F12 (P00748), Ig lambda chain V-III region SH |
| | | (P01714), Ig lambda chain V-IV region Hil (P01717), Ig heavy chain V-III region WEA |
| | | (P01763), Ig heavy chain V-II region NEWM (P01825), LRG1 (P02750), IGKV4-1 |
| | | (P06312), PROS1 (P07225), PRSS1 (P07477), C7 (P10643), C6 (P13671), CPN2 |
| | | (P22792), SERPINF1 (P36955), Ig lambda chain V-III region LOI (P80748), ABCF1 |
| | | (Q8NE71), FCN3 (O75636), F10 (P00742), Ig heavy chain V-I region HG3 (P01743), Ig |
| | | heavy chain V-III region HIL (P01771), Ig heavy chain V-II region OU (P01814), Igkappa |
| | | chain V-I region BAN (P04430), APOD (P05090), C2 (P06681), C8B (P07358), LPA |
| | | (P08519), C1S (P09871), HIST1H1D (P16402), Ig heavy chain V-I region V35(P23083), |
| | | LGALS3BP (Q08380), ATF7IP (Q6VMQ6), RASSF6 (Q6ZTQ3), MTMR14 (Q8NCE2), |
| | | DCHS1 (Q96JQ0), HIST1H2AH (Q96KK5), HMCN1 (Q96RW7), UPF3A (Q9H1J1), |
| | | IGLC7 (A0M8Q6), UNC13B (O14795), APBA3 (O96018), GSN (P06396), C4A |
| | | (P0C0L4), PZP (P20742), SERPINA4 (P29622), SHMT2 (P34897), KRT9 (P35527), |
| | | SEPP1 (P49908), COG7 (P83436), ITIH3 (Q06033), TMEM198 (Q66K66), F13A1 |
| | | (P00488), Ig kappa chain V-I region Lay (P01605), S100A6 (P06703), KRT5(P13647), |
| | | CDH2 (P19022), SAA4 (P35542), RXRG (P48443), ARFGEF3 (Q5TH69), IQCE |
| | | (Q6IPM2), C19orf68 (Q86XI8), CELSR3 (Q9NYQ7), C1RL (Q9NZP8), SARDH |
| | | (Q9UL12), MYH4 (Q9Y623) |
| Non- | PEG | C3 (P01024), A2M (P01023), APOB (P04114), IGKC (P01834), C4A (P0C0L4), C4B(P0C0L5), |
| cancer | | FGB (P02675), ALB (P02768), CFH (P08603), IGHG1 (P01857), FGA (P02671), FN1(P02751), |
| | | PLG (P00747), IGHM (P01871), FGG (P02679), TF (P02787), C5 (P01031), CP (P00450), IGHG2 |
| | | (P01859), IGLC2 (P0CG05), Ig mu heavy chain disease protein (P04220), ITIH1 (P19827), PZP |
| | | (P20742), IGHG3 (P01860), IGLL5 (B9A064), HP (P00738), C4BPA (P04003), ITIH2(P19823), |
| | | IGHA1 (P01876), KRT1 (P04264), KRT10 (P13645), APOE (P02649), Ig kappa chain V-I region |
| | | DEE (P01597), AMBP (P02760), F2 (P00734), C7 (P10643), C6 (P13671), ITIH4 (Q14624), CFB |
| | | (P00751), IGHG4 (P01861), APOH (P02749), APOA1 (P02647), CD5L (O43866), C1R(P00736), |
| | | HPR (P00739), Ig kappa chain V-I region Scw (P01609), IGHA2 (P01877), CFHR1(Q03591), |
| | | KRT2 (P35908), Ig kappa chain V-III region SIE (P01620), HRG (P04196), Ig heavy chainV-III |
| | | region BRO (P01766), C1QB (P02746), GC (P02774), Ig heavy chain V-III region TIL(P01765), Ig |
| | | kappa chain V-III region NG9 (Fragment) (P01621), Ig heavy chain V-III region BUT(P01767), Ig |
| | | heavy chain V-III region TUR (P01779), C9 (P02748), SERPIND1 (P05546), Ig kappa chainV-I |
| | | region WEA (P01610), Ig kappa chain V-I region Ni (P01613), Ig kappa chain V-IV region Len |
| | | (P01625), Ig kappa chain V-I region EU (P01598), Ig kappa chain V-II region TEW(P01617), Ig |
| | | heavy chain V-III region GAL (P01781), KNG1 (P01042), VTN (P04004), C8B (P07358), Ig |
| | | lambda chain V-III region LOI (P80748), Ig heavy chain V-II region NEWM (P01825), APCS |
| | | (P02743), KLKB1 (P03952), CFI (P05156), PROS1 (P07225), LPA (P08519), KRT9(P35527), |
| | | SERPINA1 (P01009), Ig lambda chain V-III region SH (P01714), C8A (P07357), Ig kappachain V- |
| | | III region B6 (P01619), Ig lambda chain V-IV region Hil (P01717), Ig kappa chain V-III region CLL |
| | | (P04207), C1S (P09871), FCN3 (O75636), SERPINC1 (P01008), Ig kappa chain V-I region Mev |
| | | (P01612), IGHD (P01880), C1QC (P02747), HPX (P02790), C8G (P07360), IGKV1-5 (P01602), Ig |
| | | kappa chain V-I region Wes (P01611), Ig heavy chain V-III region WEA (P01763), A1BG |
| | | (P04217), GSN (P06396), FBLN1 (P23142), HBB (P68871), ITIH3 (Q06033), F12(P00748), |
| | | SERPINA3 (P01011), APOC3 (P02656), Ig kappa chain V-I region BAN (P04430), Ig kappachain |
| | | V-III region VH (Fragment) (P04434), F13B (P05160), IGKV4-1 (P06312), SERPINF2(P08697), |
| | | CLU (P10909), HIST1H1D (P16402), PON1 (P27169), IGJ (P01591), Ig kappa chain V-III region |
| | | POM (P01624), Ig heavy chain V-III region CAM (P01768), Ig heavy chain V-III region BUR |
| | | (P01773), Ig kappa chain V-III region VG (Fragment) (P04433), APOD (P05090), Ig lambdachain |
| | | V-IV region MOL (P06889), Ig heavy chain V-III region GAR (P80419), FCGBP(Q9Y6R7), |
| | | APOM (O95445), F13A1 (P00488), Ig heavy chain V-I region HG3 (P01743), C1QA (P02745), Ig |
| | | lambda chain V-VI region WLT (P06318), C2 (P06681), C4BPB (P20851), CFP(P27918), |
| | | SERPINA4 (P29622), SAA4 (P35542), SERPINF1 (P36955), LGALS3BP (Q08380), HABP2 |
| | | (Q14520), RCBTB1 (Q8NDN9), APOL1 (O14791), KCNQ2 (O43526), F9 (P00740), Ig heavy |
| | | chain V-III region TRO (P01762), Ig heavy chain V-III region HIL (P01771), Ig heavychain V-II |
| | | region OU (P01814), APOA2 (P02652), F11 (P03951), Ig lambda chain V-I region WAH(P04208), |
| | | Ig lambda chain V region 4A (P04211), Ig kappa chain V-II region RPMI 6410 (P06310), Igkappa |
| | | chain V-III region IARC/BL41 (P06311), KRT5 (P13647), IGLL1 (P15814), Ig heavy chainV-I |
| | | region V35 (P23083), HBA1 (P69905), ADIPOQ (Q15848), PGLYRP2 (Q96PD5), UPF3A |
| | | (Q9H1J1), BCO1 (Q9HAY6), ARFGAP3 (Q9NP61), SARDH (Q9UL12), SERPINA1 (P01009), |
| | | KNG1 (P01042), Ig kappa chain V-I region Kue (P01604), Ig kappa chain V-I region Lay(P01605), |
| | | Ig kappa chain V-I region OU (P01606), Ig kappa chain V-II region MIL (P01616), Ig heavychain |
| | | V-III region VH26 (P01764), Ig heavy chain V-III region GA (P01769), FN1 (P027510), TTR |
| | | (P02766), SERPING1 (P05155), APOA4 (P06727), PRSS1 (P07477), ANXA6 (P08133), CFTR |
| | | (P13569), LBP (P18428), FBLN1 (P23142), SPAG17 (Q6Q759), PDLIM2 (Q96JY6), ARHGEF17 |
| | | (Q96PE2), IGLC7 (A0M8Q6), AGRN (O00468), AGT (P01019), RBP4 (P02753), AHSG(P02765), |
| | | Ig kappa chain V-III region GOL (P04206), SERPINA5 (P05154), GSN (P06396), Ig kappachain |
| | | V-III region HAH (P18135), CFHR2 (P36980), GIT2 (Q141611), INCENP (Q9NQS7 |
| Non- | Unenriched | LYZ (P00698), IGHG1 (P01857), KRT14 (P02533), KRT6A (P02538), APOA1 (P02647), |
| cancer | | FGA (P02671), ALB (P02768), HSPB1 (P04792), COL1A2 (P08123), KRT16 (P08779), |
| | | IGLC6 (P0CF74), KRT5 (P13647), DSP (P15924), DSP (P15924), LGALS7 (P47929), |
| | | ACTG2 (P63267), DCD (P81605), DSG1 (Q02413), FLG2 (Q5D862), SBSN (Q6UWP8), |
| | | KRT73 (Q86Y46), HRNR (Q86YZ3), KRT78 (Q8N1N4), SHROOM3 (Q8TF72), TREX2 |
| | | (Q9BQ50), SPATA7 (Q9P0W8) |
| Cancer | Non-SBED | MUC5B (Q9HC84), FABP5 (Q01469), HPX (P02790), CP (P00450), SPRR2E |
| | | (P22531), SPRR2D (P22532), PDE4D (Q08499-7), GC (P02774-2), CPD (O75976), |
| | | CD14 (P08571), LAP3 (P28838-2), AFM (P43652), FCN2 (Q15485-2), DMBT1 |
| | | (Q9UGM3-9), LIFR (P42702), SNX27 (Q96L92-3), LCN1 (P31025), ARFIP1 |
| | | (P53367-2), APOH (P02749), KLKB1 (P03952), XP32 (Q5T750), H2AFV (Q71UI9- |
| | | 5), KRT75 (095678), KRT6C (P48668), KRT83 (P78385), KRT76 (Q01546), KRT33B |
| | | (Q14525), KRT72 (Q14CN4-3), KRT31 (Q15323), KRT73 (Q86Y46-2), DSG1 |
| | | (Q02413-2), LCE1C (Q5T751), LCE1A (Q5T7P2), CFB (P00751), CFH (P08603), |
| | | SERPINA1 (P01009-2), Ig kappa chain V-I region EU (P01598), Ig kappa chain V-II |
| | | region MIL (P01616), Ig lambda chain V-IV region Bau (P01715), Ig heavy chain V-III |
| | | region GAL (P01781), IGLC6 (P0CF74) and ACTG2 (P63267-2) |
| Cancer | SBED | Probable ubiquitin carboxyl-terminal hydrolase FAF-Y (O00507-1; O00507-2); |
| | | Homeobox protein Hox-C12 (P31275); putative uncharacterized protein C18orf65 |
| | | (Q6ZTR6); Piwi-like protein 2 (Q8TC59-2; Q8TC59-1); Probable ubiquitin carboxyl- |
| | | terminal hydrolase FAF-X (Q93008-1; Q93008-3); Histone-lysine N-methyltransferase |
| | | ASH1L (Q9NR48; Q9NR48-2); PNMA-like protein 2 (Q9ULN7-5) |

[0980] The biomarkers in this Example can be used to detect microvesicles that are indicative of cancer or non-cancer samples.

### Example 24: Identification of Biomarkers Through Affinity Enrichment with an Enriched Oligonucleotide Library and Mass Spectrometry

[0981] This Example continues upon the Example above. Identification of protein-protein and nucleic acid-protein complexes by affinity purification mass spectrometry (AP-MS) can be hampered in samples comprising complex mixtures of biological components (e.g., bodily fluids including without limitation blood and derivatives thereof). For example, it may be desirable to detect low abundance protein and nucleic acid-protein complexes in a complex milieu comprising various components that may interact promiscuously with specific binding sites such as high abundance proteins that interact non-specifically with the affinity resin. AP-MS has been used previously to enrich for pre-identified targets of interest using individual DNA or RNA aptamers or specific nucleic acid binding domains. In this Example, an enriched oligonucleotide probing library was used as the affinity reagent. This approach combined with mass spectrometry enables the identification of differentially expressed biomarker from different disease states or cellular perturbations without relying on a priori knowledge of the targets of interest. Such biomarker may comprise proteins, nucleic acids, miRNA, mRNA, carbohydrates, lipid targets, combinations thereof, or other components in a biological system.

[0982] The method comprises identification of an enriched oligonucleotide probe library according to the methods of the invention followed by target identification with affinity purification of the bound probing library and mass spectrometry. The members of the enriched oligonucleotide probing library comprise an affinity tag. A biological sample is probed with the oligonucleotide probe library, affinity purification of the oligonucleotide probe library via the affinity tag is performed which will accordingly purify biological entities in complex with various members of the probe library, and read-out of targets that purified with the members of the probe library is performed using liquid chromatography-tandem mass spectrometry (LC-MS/MS) for proteins or oligonucleotide targets (e.g., miRNA or mRNA) with next generation sequencing (NGS). Confirmation of protein targets is performed using quantitative mass spectrometry (MS), e.g., using MRM/SRM or SWATH based methods.

[0983] The method of the Example lends itself to various options. For example, any appropriate affinity tags can be used for affinity pull-down, including without limitation anti-sense oligonucleotides, biotin, polyhistidine, FLAG octapeptide (i.e., N-DYKDDDDK-C(SEQ ID NO. 134), where N stands for Amino-terminus and C stands for Carboxy terminus), 3×FLAG, Human influenza hemagglutinin (HA)-tag (i.e., N-YPYDVPDYA-C(SEQ ID NO. 135)), myc-tag (N-EQKLISEEDL-C(SEQ ID NO. 136)), other such as known in the art, and combinations thereof. Similarly, any appropriate enrichment support can be used in addition to the magnetic streptavidin beads exemplified herein, including without limitation other bead systems, agarose beads, planar arrays or column chromatography supports. It follows that the various supports can be coupled with the various affinity reagents appropriate for the oligonucleotide library, including without limitation streptavidin, avidin, anti-His tag antibodies, nickel, and the like. The different affinity tags and supports can be combined as desired. This Example used cross-linking but in certain cases such cross-linking is not necessary and may even be undesirable, e.g., to favor identification of high affinity complex formation. When cross-linking is desired, any appropriate cross-linkers can be used to carry out the invention, including BS2G, DSS, formaldehyde, and the like. Other appropriate cross-linkers and methods are described herein. See, e.g., Section “Aptamer Target Identification.” Lysis buffers and wash stringencies can be varied, e.g, depending on whether complexes are cross-linked or not. Less stringent lysis/wash conditions may produce a wider array of potential protein complexes of interest whereas more stringent lysis/wash conditions may favor higher affinity oligo-target complexes and/or targets comprising specific proteins (e.g., by disassociating larger complexes bound to the oligos). One of skill will further appreciate that qualitative and/or quantitative LC-MS/MS may be used for target detection and verification. Similarly, metabolic labeling and label-free approaches may be used for quantitative MS, including without limitation spectral counting, SILAC, dimethyl labeling, TMT labeling, Targeted MS with SRM/MRM or SWATH, and the like.

### REFERENCES

[0984] Vickenborg et al. “Aptamer based affinity labeling of proteins”, Angew Chem Int. 51(36):9176-80 (2012).
[0985] Tacheny, M, Arnould, T., Renard, A. “Mass spectrometry-based identification of proteins interacting with nucleic acids”, Journal of Proteomics 94; 89-109 (2013).
[0986] Faoro C and Ataide S F. “Ribonomic approaches to study the RNA-binding proteome.”, FEBS Lett. 588(20):3649-64 (2014).
[0987] Budayeva H G, Cristea, IM, “A mass spectrometry view of stable and transient protein inteeractions.” Adv Exp Med Biol. 806:263-82 (2014).

### Example 25: Protocol for Affinity Capture Using Oligonucleotide Probing Library

[0988] This Example presents a detailed protocol for the method of affinity capture using an oligonucleotide probing library presented in the Example above.

### Protocol:

[0989] The oligonucleotide probe library comprises F-TRin-35n-B-8-3s described herein either desthiobiotin labeled or unlabeled library and binding to normal (i.e., non-cancer) female plasma. The oligonucleotide probe library is enriched against the plasma samples as described elsewhere (e.g., in Example 21). The plasma samples are processed separately against the desthiobiotin labeled or unlabeled oligonucleotide libraries. General parameters included the following:

[0990] 48 normal plasma samples are pooled for enrichment of each oligonucleotide library (Desthiobiotin or Unlabeled)

[0991] 200 μl input plasma per sample

[0992] Ultracentrifugation (UC) is used to pre-clear the samples

[0993] 5 ng of each aptamer library is added to each sample

[0994] Binding competitors for all library samples include 0.01×S1 (dextran sulfate), 340 ng for tRNA and 340 ng Salmon sperm DNA as described elsewhere herein

[0995] 6% PEG 8000 is used for precipitation of microvesicles within the samples

[0996] Affinity purification is performed with C1 Streptavidin beads (MyOne Streptavidin Beads C1-65001, lot 2 ml (10 mg/ml))

### Buffers:

[0997] Plasma dilution: 6 mM MgCl2 in 2×PBS

[0998] Pellet Wash Buffer: 1×PBS, 3 mM MgCl2

[0999] PEG Ppt Buffer: 20% Peg8000 in 1×PBS, 3 mM MgCl2

[1000] Bead Prep Buffer: 1×PBS containing 0.01% Triton X-100

[1001] Lysis Buffer: prepare a 2× stock solution consisting of 100 mM Tris-HCl, 20 mM MgCl2, 400 mM NaCl, 1% Triton X-100, 10% glycerol, pH 7.5. Diluted to 1× with water 1:1 prior to using.

[1002] AP Wash buffer 1: 10 mM Tris-HCl, 1 mM EDTA, 2M NaCl, 1% Triton X-100, pH 7.5

[1003] AP wash buffer 2: 10 mM Tris-HCL, 1 mM EDTA, 2M NaCl, 0.01% Triton X-100, pH 7.5

[1004] Biotin Elution buffer 1: 5 mM Biotin, 20 mM Tris, 50 mM NaCl, pH 7.5

[1005] 1×LDS, 1× Reducing buffer 2

### Reagent/Instrument Prep:

[1006] Pre-chill Ultracentrifuge to 4° C.

[1007] Protease inhibition: dissolve 2 tablets of “cOmplete ULTRA MINI EDTA-free EASYpack” protease inhibitor in 1100 μl of H2O (20× stock of protease inhibitor).

### Plasma Preparation (for Each of Desthiobiotin or Unlabeled Oligonucleotide Libraries):

[1008] 1. Add 50 μl of protease inhibitor to each ml of sample (on top of frozen plasma) in a room temperature (RT) water bath. Will use 22 mls of pooled plasma, so 1100 μl inhibitor.
[1009] 2. To remove cell/debris, spin samples at 7500×g 20 min, 4° C. in the Ultracentrifuge.
[1010] 3. Collect the supernatant, pool and measure volume & record.
[1011] 4. Add an equal volume of 2×PBS, 6 mM MgCl₂ to the plasma.
[1012] 5. Label low-retention eppendorf tubes 1-96.
[1013] 6. Transfer 400 μl of each sample to eppendorf tubes based on appropriate tube map
[1014] 7. Using an electronic P200, add competitors: 8.6 μl of 40 ng/μl Salmon sperm DNA; 8.6 μl of 40 ng/μl tRNA; 8.6 μl of 0.5×S1.
[1015] 8. Incubate at RT with end over end rotation for 10 min.
[1016] 9. Add 10 μL of appropriate oligo library, mix well. Save any leftover diluted library for gel control (see below).
[1017] 10. Incubate 1 hr at RT with end over end rotation.
[1018] 11. Using an electronic repeat P100, add 187 μl of 20% PEG 8000 to sample for a final 6% concentration to the 435.5 μl of sample/oligo library. Invert a few times to mix and incubate for 15 min at 4° C.
[1019] 12. Spin each sample in table top centrifuge at 10,000×g for 5 min.
[1020] 13. Remove supernatant and discard, add 1 ml 1×PBS, 3 mM MgCl₂ to pellet.
[1021] 14. Wash pellet by gentle inversion
[1022] 15. Remove buffer, re-suspend pellets in 100 μl 1×PBS, 3 mM MgCl₂: incubate at RT for 10 min on mixmate @ 900 rpm to re-suspend. Make sure each sample is well re-suspended by pipetting.
[1023] 16. Pool all desthiobiotin library samples into one 50 ml falcon tube, and the unlabeled library into another, total volume for each should be 4800 μl.
[1024] 17. Take 10 μL aliquot for the input into AP sample for gel (add 10 μL of 2×LDS buffer w/2× reducing agent.

### Affinity Purification:

[1025] 18. Prepare 10 μL of MyOne Strep-coated Magnetic beads per each condition into a 1.5 ml eppendorf tube and place on a magnetic bead rack. Have a Bead only control as well (n=3)
[1026] 19. Remove supernatant and wash 1×500 μl with Bead buffer.
[1027] 20. Discard supernatant
[1028] 21. Resuspend beads in an equal volume of 1×PBS, 3 mM MgCl₂ (equal vol to what was taken out originally=10 μl)
[1029] 22. Add the 10 μl of beads directly to the 4780 μL from step 19. To Bead only control add PBS.
[1030] 23. Incubate samples with streptavidin beads 1 hr RT on plate shaker (taped).
[1031] 24. Place on the large magnetic stand for 1 min and remove supernatant
[1032] 25. Add 1.5 mL of 1× lysis buffer to the samples (do 3×500 μl with a good rinse of the 50 mL falcon tube for each to collect all the beads) and transfer to a new set of eppendorf tubes.
[1033] 26. Incubate for 20 min on ice.
[1034] 27. Place tubes in magnetic bead rack, let equilibrate 1 min and remove the supernatant.
[1035] 28. Wash the beads with wash buffer #1 via vortexing. Resuspend well.
[1036] 29. Place tubes on magnetic bead rack, let equilibrate 1 min and remove the supernatant
[1037] 30. Wash 2 additional times as with wash buffer #1 steps 27-29 (total 3 washes with wash buffer #1)
[1038] 31. Repeat steps 27-29 (2) additional times with wash buffer #2
[1039] 32. During the last wash transfer beads to a new eppendorf tube. (to reduce non-specific binding)
[1040] 33. Do one dry spin to make sure all residual wash buffer is removed.
[1041] 34. Add 10 μl of Biotin Elution buffer 1 to beads
[1042] 35. Incubate for 15 minutes at 37° C.
[1043] 36. Place on magnetic stand for 1 min, collect sup and transfer to a new tube, add 10 μL of 2×LDS, 2× Reducing agent to eluted sample. Save as Elution #1.
[1044] 37. Add 10 μl of 1×LDS Sample Buffer, 1× Reducing buffer to magnetic beads.
[1045] 38. Boil the samples for 15 min at 90° C. The boiling time is 15 minutes to ensure the streptavidin on the beads unfolds and releases the biotinylated aptamer-protein complex.
[1046] 39. Place samples on magnetic stand on ice and collect the eluted sample. This is Elution #2. Discard the beads.
[1047] 40. Gel 1 layout:
   [1048] Lane 1: 5 ng Desthiobiotin library
   [1049] Lane 2: 1×LDS
   [1050] Lane 3: Marker
   [1051] Lane 4: Desthiobiotin Elution #1
   [1052] Lane 5: Unlabeled Elution #1
   [1053] Lane 6: Bead only Elution #1
   [1054] Lane 7: Desthiobiotin Elution #2
   [1055] Lane 8: Unlabeled Elution #2
   [1056] Lane 9: Bead only Elution #2
   [1057] Lane 10: Input for AP (saved from step 17)

### Running Reducing SDS Gel:

[1058] Prepare 1×MOPS SDS Running Buffer from 20×MOPS SDS Buffer

[1059] Use 10 or 12 well 4-12% Bis Tris gel

[1060] Peel off tape seal and place in the gel box. Insert spacer for second gel cassette if needed

[1061] Fill the inside/upper chamber with running buffer MOPS (1×) and 500 ul Antioxidant

[1062] Remove the comb carefully, not disturbing the wells

[1063] Rinse the wells with the running buffer to remove the storage buffer which can interfere with sample running

[1064] Slowly load samples to each well carefully using L-20 tip

[1065] Fill the outer/lower chamber with approximately 600 ml of running buffer MOPS (1×)

[1066] Place top portion of unit and secure correct electrodes

[1067] Run the gel to migrate proteins

[1068] 100 V constant for samples to move through stack (until all samples line up) for 15 min

[1069] Increase to 150 V constant for running (until visible sample buffer comes to bottom) for ˜1 hr

[1070] At the end of the run, stop the power supply and remove the gel cassettes from cell

[1071] Disassemble the gel cassette by with gel knife.

[1072] Remove one side of cassette case. Trim off the gel foot and wells (avoid drying gel).

[1073] Transfer gel into container filled with Mili Q water and perform a quick wash.

### Silver Staining:

### Materials:

[1074] ProteoSilver TMSilver Stain Kit, Sigma Catalog No. PROT-SIL1, Lot No. SLBJ0252V

[1075] Ethanol, Fisher Scientific Catalog No. BP2818-4, Lot No. 142224

[1076] Acetic acid, Acros organics Catalog No. 14893-0025, Lot No. B0520036

[1077] Water, Sigma Catalog No. W4502, Lot No. RNBD1581

[1078] Preparation:
[1079] 1. Fixing solution. Add 50 ml of ethanol and 10 ml of acetic acid to 40 ml of ultrapure water.
[1080] 2. 30% Ethanol solution. Add 30 ml of ethanol to 70 ml of ultrapure water.
[1081] 3. Sensitizer solution. Add 1 ml of ProteoSilver Sensitizer to 99 ml of ultrapure water. The prepared solution should be used within 2 hours. A precipitate may form in the ProteoSilver Sensitizer. This precipitate will not affect the performance of the solution. Simply allow the precipitate to settle and remove 1 ml of the supernatant.
[1082] 4. Silver solution. Add 1 ml of ProteoSilver Silver Solution to 99 ml of ultrapure water. The prepared solution should be used within 2 hours.
[1083] 5. Developer solution. Add 5 ml ProteoSilver Developer 1 and 0.1 ml ProteoSilver Developer 2 to 95 ml of ultrapure water. The developer solution should be prepared immediately (<20 minutes) before use.
[1084] 6. All steps should be carried out in the hood and waste needs to be collected in toxic designated container.

### Procedure

### A. Direct Silver Staining

[1085] All steps are carried out at room temperature on an orbital shaker at 60 to 70 rpm.
[1086] 1. Fixing—After electrophoresis of the proteins in the mini polyacrylamide gel, place the gel into a clean tray with 100 ml of the Fixing solution overnight in the hood. Cover tightly.
[1087] 2. Ethanol wash—Decant the Fixing solution and wash the gel for 10 minutes with 100 ml of the 30% Ethanol solution.
[1088] 3. Water wash—Decant the 30% Ethanol solution and wash the gel for 10 minutes with 200 ml of ultrapure water.
[1089] 4. Sensitization—Decant the water and incubate the gel for 10 minutes with 100 ml of the Sensitizer solution.
[1090] 5. Water wash—Decant the Sensitizer solution and wash the gel twice, each time for 10 minutes with 200 ml of ultrapure water.
[1091] 7. Silver equilibration—Decant the water and equilibrate the gel for 10 minutes with 100 ml of the Silver solution.
[1092] 8. Water wash—Decant the Silver solution and wash the gel for 1 to 1.5 minutes with 200 ml of ultrapure water.
[1093] 9. Gel development—Decant the water and develop the gel with 100 ml of the Developer solution. Development times of 3 to 7 minutes are sufficient to produce the desired staining intensity for most gels. Development times as long as 10 to 12 minutes may be required to detect bands or spots with very low protein concentrations (0.1 ng/mm2).
[1094] 10. Stop—Add 5 ml of the ProteoSilver Stop Solution to the developer solution to stop the developing reaction and incubate for 5 minutes. Bubbles of CO₂ gas will form in the mixture.
[1095] 11. Storage—Decant the Developer/Stop solution and wash the gel for 15 minutes with 200 ml of ultrapure water. Store the gel in fresh, ultrapure water and take picture for documentation.

### Protein Identification

[1096] Protein bands of interest were excised from the gradient gels and subjected to liquid chromatography-tandem mass spectrometry (LC-MS/MS) as above.

### Example 26: Oligonucleotide Probes: Breast Cancer Versus Non-Cancer

[1097] This Example presents breast cancer oligonucleotide probes identified in a library enriched against balanced fractions pool of plasma-derived microvesicles from patients with 50% aggressive cancer. General methodology is as presented in Example 21 above. The samples comprised pools of 30 each of breast cancer patient plasma and healthy plasma (i.e., non-cancer controls). A set of cancer specific aptamers was identified where each aptamer has a fold change exceeding two when compared to either the healthy plasma pool (normal and non-cancer) or process control (no negative selection enriched library).

### Methodology

[1098] The F-TRin-35n-B 8-3s library as described herein was enriched against microvesicles from the plasma samples. See Example 21 with the modifications noted below. The screened library comprised a 5′ region (5′ CTAGCATGACTGCAGTACGT 3′ (SEQ ID NO. 131)) followed by the random naïve aptamer sequences and a 3′ region (5′ CTGTCTCTTATACACATCTGACGCTGCCGACGA (SEQ ID NO. 132)). In the previous enrichment protocol in Example 21, positive, negative and positive selections were performed before each cycle of PCR to re-amplify the library. But in the current enrichment protocol, the aptamer library was purified with streptavidin beads after each selection and the beads were directly used for PCR amplification. Also as compared to prior experiments, the new sample pool for aptamer enrichment was balanced for different plasma fractions and collection vial for each of cancer, non-cancer and normal patients. Specifically, plasma was initially collected in 4 tubes from each patient, each of those 4 tubes were split into 3 aliquots, resulting in 12 aliquots from each patient. For example, a 1st tube out of the 4 results in aliquots 1A, 1B and 1C, the same split is repeated for the other three aliquots, which results in 12 aliquots from each patient (1A-C, 2A-C, 3A-C, 4A-C). Correspondingly, a pool of 60 patients consists of each variant repeated 5 times (5×12). Enrichment was done according to the selection methodology outlined above, where the library was PCR amplified after each binding round for 7 rounds, which include 3 positive selections against cancer-derived samples, 3 negative selections against controls, and a final positive selection. The enriched library was subjected to the probing test on cancer and healthy pools of plasma samples. There was a subset of 296 cancer specific aptamers, which have a relatively higher read count and fold change >2 as compared to healthy pool and process control. The detailed protocol is as follows:

### Equipment & Supplies

[1099] 1×PBS (HiClone): SH30256.01, Lot #: AZC186921, bottle #1476, exp. 05/2016. Supplemented with 3 mM MgCl₂ (4227844, USB) in steps 6, 7, 11.

[1100] Table Top centrifuge: 0363

[1101] 20×S1: Aptamer Science TT 070214, LN: 14F-01-S1, exp. 2015-06

[1102] PEG8000—lot #SLBJ9928V cat #91458, protease inhibitor Ref—05892791, Water—ref 10977-015, lot #1606173

[1103] 2×PBS+6 mM MgCl₂—PBS (Sigma)—SLBK2636V, Water—RNBD2918, MgCl₂-4227844 (USB). Used in steps: 5, 9.

[1104] Stock yeast tRNA (Ambion)—lot #1406019. Salmon DNA (Invitrogen)—lot #1617974

[1105] Starting solution comprises 5 ng Non-Enriched F-Trin-35n-B aptamer library, 300 ul of plasma, 0.01× S1+0.8 ng/ul Salmon DNA/tRNA (competitor DNAs), 6% PEG8000 (to precipitate microvesicles); final volume 600 ul.

### Round 1 (1st Positive Enrichment)

[1106] Step 1: Pre-chill tabletop centrifuge at 4° C.
[1107] Step 2: Protease inhibition: dissolve 1 tablet of “cOmplete ULTRA MINI EDTA-free EASYpack” protease inhibitor in 550 ul of H2O (20× stock of protease inhibitor).
[1108] Step 3: Add 50 ul of protease inhibitor to the sample (on top of frozen plasma) and start thawing: 1 ml total ea.
[1109] Step 4: Cell spin: To remove cells/debris, spin samples at 10,000×g, 20 min, 4° C. Collect the entire volume of supernatant (SN) without disturbing the pellet.
[1110] Step 5: Mix SN from step 4 with equal volume of 2×PBS 6 mM MgCl₂, collect 600 ul ea into 2 ml Fisher Low binding tubes for use in step 6. Store remaining sample at 4° C. for the following rounds.
[1111] Step 6: Blocking: Add competitors in order: 1) Salmon DNA Stock; 2) tRNA; 3) S1. Make dilutions to desired concentration (see starting solution above) in 1×PBS, 3 mM MgCl2, mix well. Incubate for 10 min at room temperature (RT), end-over-end rotation.
[1112] Step 7: Binding: Add ssDNA Probing library to the final concentration 12.5 pg/ul for binding. Make dilutions in 1×PBS, 3 mM MgCl₂.
[1113] Step 8: Precipitation: Add buffer (20% PEG8000 in 1×PBS with 3 mM MgCl₂) to sample to the final PEG concentration 6%.
[1114] Step 9: Spin at 10,000×g for 5 min, RT.
[1115] Step 10: Wash: Remove SN, add 1 ml 1×PBS, 3 mM MgCl2 and wash pellet by gentle invertion with 1 ml aptamer buffer.
[1116] Step 11: Resuspention: Remove buffer, Re-suspend pellets in 200 ul H2O: incubate at RT for 10 min on mixmate 900 rpm. Ensure each sample is re-suspended by pipetting after step 11.
[1117] Step 12: Purification: Aptamers elution from PEG/Protein pellet with Streptavidin beads (Dynabeads #65001: Dynabeads® MyOne™ Streptavidin C1):
   [1118] Beads stock: 10 mg/ml; Capacity: >2,500 pmoles/mg;
   [1119] 10 ul beads should bind 250 pmoles Biotin
   [1120] 3 ul beads for each aptamer library (AL) sample can bind 75 pmoles Biotin
   [1121] Library input in the protocol above is ˜5 ng, which is 0.17 pmol
   [1122] 12.1) Pre-washing Streptavidin Magnetic Beads:
   [1123] 12.1.1 Add 10 uL of Streptavidin Magnetic Beads into 1.5 mL microcentrifuge tube (3 ul×2 samples+ overage)
   [1124] 12.1.2 Place the tube into a magnetic stand to collect the beads against the side of the tube. Remove and discard the supernatant.
   [1125] 12.1.3 Add 0.5 mL of Wash Buffer (1×PBS with 0.1% Tween 20) to the tube. Invert the tube several times or vortex gently to mix. Collect the beads with a magnetic stand, then remove and discard the supernatant.
   [1126] 12.1.4 Wash once with 0.5 ml 1×PBS, collect the beads with a magnetic stand, then remove and discard the supernatant.
   [1127] 12.1.5 Add 35 ul 1×PBS to tubes. Aliquot into 10 ul per well (using repeater pipet) in 1.5 ml Fisher low-binding tubes. Add 40 ul of 1×PBS.
   [1128] 12.2) Incubate 100 ul of sample, recovered in step 12, at 50° C. for 10 min (mixmate, 500 rpm) (to denature/remove protein/PEG from aptamer library)
   [1129] 12.3) Sample Binding:
   [1130] 12.3.6 Add heat denatured samples to beads (aliquoted in step 5).
   [1131] 12.3.7 Incubate for 30 min, 37° C., mixmate at 800 rpm. Spin down at 2000 rpm for 20 sec.
   [1132] 12.3.8 Collect the beads (with bound aptamers) using magnet and remove the supernatant by multichanel pipet.
   [1133] 12.3.9 Take tubes off the magnet, add 300 ul of 1×PBS, pipet well. Collect the beads with magnetic stand, then remove supernatant.
   [1134] 12.3.10 Add 100 ul H2O to resuspend beads by multichanel pipet.
   [1135] 12.3.11 Block the beads with Biotin: add 7.5 ul from 10 uM stock, incubate 15 min, RT, 800 rpm.
   [1136] 12.3.12 Collect the beads (with bound aptamers) using magnet and remove the supernatant by multichanel pipet. Take tubes off the magnet, add 200 ul of 1×PBS, pipet well. Collect the beads with magnetic stand, then remove supernatant.
   [1137] 12.3.13 Add 100 ul H2O
[1138] Step 13: Use beads with bound aptamer library directly in re-AMP PCR (3×33 ul)
[1139] Step 14: Agarose gel
   [1140] SYBR Gold gel lot #: H204044-01
   [1141] 2 ul of sample+8 ul of loading buffer. Run for 10 cycles
   [1142] If no dsDNA bands appear, run additional 3 cycles
   [1143] Optional: if PCR product has non-specific bands, perform gel cut.
[1144] Step 15: dsDNA purification with Nucleospin column (NTI binding buffer):
   [1145] 2× volume of buffer NTI per sample volume (600 ul NTI to 300 ul sample)
      [1146] combine 3 wells per column
      [1147] 5 min elution in 30 ul NE buffer, RT. Add 20 ul of NE after elution.
[1148] Step 16: Optional: Gel, SybrGold, Agarose: to verify product with correct size is observed
[1149] Step 17: Quantify dsDNA (QuBit, Life Technologies) (keep 5 ul of dsDNA as control for gel later)
[1150] Step 18: Lambda digestion at 37C for 2 h; heat inactivation at 80C for 10 min.
[1151] Step 19: ssDNA purification with Nucleospin column (NTC binding buffer).
   [1152] combine 3 samples per column
   [1153] elution: 5 min in 30 ul NE buffer, RT
[1154] Step 20: Quantify dsDNA (QuBit, Life Technologies) ssDNA (5 ul)
[1155] Step 21: Gel ssDNA: load between 2 ng and 10 ng

### Round 2 (2d Positive Enrichment)

[1156] Repeat protocol starting from step 6 above, using diluted plasma samples stored in step 5. All steps are the same except for step 7. Input of library is 5 times less
[1157] Step 7: Binding: Add ssDNA Probing library to the final concentration 2.5 pg/ul for binding. Make dilutions in 1×PBS, 3 mM MgCl2.
[1158] Steps 6-13: As above. Use entire 100 ul of re-suspended sample to re-amplify via PCR
[1159] Steps 14-20: ssDNA preparation as above.

### Round 3 (3rd Positive Enrichment)

[1160] Repeat steps as shown for round 2

### Round 4 (Negative Enrichment)

[1161] Make sure to use correct negative samples (e.g., non-cancer sample in the case of positive cancer selection above, or vice versa)
[1162] Steps 1-9: Repeat as in Round 2 above (ssDNA input is 2.5 pg/ul).
[1163] Step 10: Collect SN (˜900 ul) and discard pellet after PEG precipitation.
[1164] Step 11: Resuspention: Not needed in this step
[1165] Step 12: Purification: Aptamers elution from PEG/Protein pellet with Streptavidin beads (Dynabeads #65001: Dynabeads® MyOne™ Streptavidin C1):
   [1166] Beads stock: 10 mg/ml; Capacity: >2,500 pmoles/mg;
   [1167] 10 ul beads should bind 250 pmoles Biotin
   [1168] 3 ul beads for each AL sample can bind 75 pmoles Biotin
   [1169] Library input in the protocol above is ˜5 ng, which is 0.17 pmol
      [1170] CHANGE FOR SN->For each sample, split 900 ul SN collected in step 10 above into two aliquots 450 ul ea, consider 3 ul of beads per each aliquot.
   [1171] 12.1) Pre-washing Streptavidin Magnetic Beads:
   [1172] 12.1.1 Add 30 uL of Streptavidin Magnetic Beads into 1.5 mL microcentrifuge tube. Four samples make 8 aliquots (for beads treatment)×3 ul beads+ overage.
   [1173] 12.1.2 Place the tube into a magnetic stand to collect the beads against the side of the tube. Remove and discard the supernatant.
   [1174] 12.1.3 Add 0.5 mL of Wash Buffer (1×PBS with 0.1% Tween 20) to the tube. Invert the tube several times or vortex gently to mix. Collect the beads with a magnetic stand, then remove and discard the supernatant.
   [1175] 12.1.4 Wash 1 time with 0.5 ml 1×PBS, collect the beads with a magnetic stand, then remove and discard the supernatant.
   [1176] 12.1.5 Add 105 ul 1×PBS to tubes. Aliquot into 10 ul per well (using repeater pipet) in 1.5 ml Fisher low-binding tubes. Add 40 ul of 1×PBS.
   [1177] 12.2) Incubate 900 ul of sample, recovered in step 10, at 50° C. for 10 min (mixmate, 500 rpm) (to denature/remove protein/PEG from aptamer library)
   [1178] 12.3) Sample Binding:
   [1179] 12.3.6 Add ½ (450 ul) heat denatured samples to beads (aliquoted in step 5).
   [1180] 12.3.7 Incubate for 30 min, 37° C., end-over-end rotation. Spin down at 2000 rpm for 20 sec.
   [1181] 12.3.8 Collect the beads (with bound aptamers) using magnet and remove the supernatant by multichanel pipet.
   [1182] 12.3.9 Take tubes off the magnet, add 300 ul of 1×PBS, pipet well. Collect the beads with magnetic stand, then remove supernatant.
   [1183] 12.3.10 Add 100 ul H2O to resuspend beads by multichanel pipet.
   [1184] 12.3.11 Block the beads with Biotin: add 7.5 ul from 10 uM stock, incubate 15 min, RT, 800 rpm.
   [1185] 12.3.12 Collect the beads (with bound aptamers) using magnet and remove the supernatant by multichanel pipet. Take tubes off the magnet, add 200 ul of 1×PBS, pipet well. Collect the beads with magnetic stand, then remove supernatant.
   [1186] 12.3.13 Add 100 ul H2O per purification sample (total 200 ul per negative enrichment sample)
   [1187] 12.3.14 Split each sample into 3 aliquots (33 ul each), this results into 6 wells per enrichment sample.
[1188] Step 13: Perform PCR

### Rounds 5, 6: Same as Round 4

### Round 7: Repeats Steps as Shown for Round 2

### Results

[1189] FIGS. 14A-B are scatter plots showing high correlation of frequencies between replicates of cancer pool (FIG. 14A) and appearance of cancer specific subset of aptamers when cancer and healthy pools are compared (circled region in FIG. 14B). FIGS. 14C-F are scatter plots showing the appearance of cancer specific subset of aptamers when the cancer pool profile of the enriched library (i.e., C-RN7) was compared to the cancer pool of the process control library (CP; FIG. 14C) and healthy pool profile of process control library (HP; FIG. 14D). We did not observe a similar subset when the healthy pool profile (C-RN7 v HP) of the enriched library was compared to both variants of profile of process control (FIGS. 14E-F, see points along x-axis).

[1190] Selections of aptamer sequences identified in the enrichment screening are shown in Tables 27-29. In these tables, each complete aptamer sequence is assembled from 5′ to 3′ as a 5′ region, the variable region, and 3′ region. The sequences are shown 5′ to 3′ from left to right, wherein each complete sequence consists of a 5′ leader sequence 5′-CTAGCATGACTGCAGTACGT (SEQ ID NO. 131) followed by the indicated Variable Region sequence followed by the 3′ tail sequence 5′-CTGTCTCTTATACACATCTGACGCTGCCGACGA (SEQ ID NO. 132). The top 50 cancer specific sequences are shown in Table 27, each having a relatively high copy number in these experiments and a cancer/normal copy number ratio of at least 2-fold higher in the cancers. Table 28 comprises 25 sequences with mid-level copy number and a cancer/normal copy number difference of 0.8-1.2-fold. Table 29 shows a selection of 25 more sequences with low copy numbers and cancer/normal copy number ratio of ˜1.0 (i.e., no significant difference).

TABLE 27
Cancer-Specific Sequences

| SEQ | |
|---|---|
| ID | |
| NO. | Variable Region |
| 137 | AACCCGCGTGATTGGGGTACTGCCCATGCGACTTT |
| 138 | AACTGAAGGCCAATTAAACTCCACTGTGCTAATCT |
| 139 | ACATGCCGGCGTTGATACTCTACTGTGCTCCATTATGA |
| 140 | AGACATGCCACGCCCTTTACATACTCCACTGTGCCA |
| 141 | AGCCACGCAGACCTATCTCTACTGTGCCAATGTT |
| 142 | AGGTACGTAAGGCTGCCATTACTCTCTACTGTGCCGA |
| 143 | AGTCTAGCGATCGACTTTTCTCTACGGTGCCCTTC |
| 144 | AGTGTGCGCATGAATCCATTACTCCACTGTGCCTTGA |
| 145 | AGTTGCAGACCCTTGTATTCTCTACCGTGCCCTATGA |
| 146 | CACTGCTAACTGATATTGTTGAACTCCACCGTGC |
| 147 | CATGCGACAAGCTTCCATTAACCATCCGCTATTTATGA |
| 148 | CATGCGGACCACGCTTTCACAAACTCATGATTCAAA |
| 149 | CATGCGTACGTCCTATTCTCTCTACTGTGCATTAA |
| 150 | CCTGCAATGCGGAAACCCTTCTACTCTACTGTGCC |
| 151 | CGCGAGCCAGGGTACTGCCTGCGGTCTAAACAATCA |
| 152 | CGTGCGACTTGTTCTCTACTGTGCCAATAAACCATA |
| 153 | GATAGCGCATATTCCTCTACTGTGCTACTTGTTAT |
| 154 | GCAAACCAATTAGTGTACCTCTACCGTGCCCAATGA |
| 155 | GCAACTACTCTCTACCGTGCCCAGTGATTTCTCCATGA |
| 156 | GCACCACATGTCAATCTCTACTGTGCTTATCTCATA |
| 157 | GCAGCACAAAAGTTACTCTCCTCTACCGTGCCCCTA |
| 158 | GCAGTTTGCGTGGATACTCTACTGTGCTGACCCTTA |
| 159 | GCATACATGAACTCTACCGTGCCCGTTGACTTGAAA |
| 160 | GCATAGCGGTTCACATTATTTTACTCTACCGTGCC |
| 161 | GCCACAGTATCGTTCTCGAGCTGGTTCCCGCCAT |
| 162 | GCGAACATCACTCTACCGTGCCATCTGAAATGACGTGA |
| 163 | GCGAACTTGTAACTCTACTGTGCTTATATTAAGGTTGA |
| 164 | GCGACCAATACTCTACTGTGCTGATACGGATTTTA |
| 165 | GCGACCACTCTATAACCTCAACCGTGCTCACTCCT |
| 166 | GCGCAAGTTGTCTCTACCGTGCCCCGAAAGTTTTGGA |
| 167 | GCGCACCACCTACATTGTCTCCACCGTGCTTTATT |
| 168 | GCGCACCCACGTGAACTCTACCGTGCCTATTTCCTA |
| 169 | GCGCACCGACCTCTACCGTGCCAAAATAGGTTATCTGA |
| 170 | GCGCCACCACACAAACCTTCCCTATCGAGGGAGAT |
| 171 | GCGCGGACTATATTACTCTACTGTGCCCTGCTTATGA |
| 172 | GCGGATAGGACAATAACTTACTCCACTGTGCCATC |
| 173 | GCGGTGACCTCTACTGTGCGCCCCAAGCCTTAGTT |
| 174 | GCGTACAGAACCTCTACCGTGCCCACTCACTTCCATGA |
| 175 | GCGTCCCCTCCCGGATGGTCCTTTCTCTACTGTGC |
| 176 | GCGTGCTAACGGTATGCAAGACGTATGCGATTTTC |
| 177 | GCTAGACCGATCCACCTCAAACCTCTACTGTGCCT |
| 178 | GCTAGCTTAGCTCTACCGTGCACATTCCGCTATTT |
| 179 | GGTGCAGGCAAGATATTTTACTCTACTGTGCATTT |
| 180 | GTAAATGTACATGCGTATCCTCACCTCTACTGTGC |
| 181 | TAACACGTCTTTCACTCTACTGTGCCCTTTATGCC |
| 182 | TAATGGCATGCGGACCTATCCTCTACCGTGCTCCTTGA |
| 183 | TATGCGATTTCTCTACCGTGCCAATATGCCTTGTT |
| 184 | TCTGCGATTCTACCGTTACTCTACCGTGCCACCAAA |
| 185 | TGCGCAGTCATTTCGCCATGTTCTCTACCGTGCCAA |
| 186 | TGTCAGGCGGTAGTACTCTCCACCGTGCCTATTGTTGA |

TABLE 28
Moderate Control Sequences

| SEQ | |
|---|---|
| ID | |
| NO. | Variable Region |
| 187 | ACATGCATACCCTACGAATCGTTCCATCACCATAC |
| 188 | AGTCAGTGCGCCCGCTATTTACGATCTCACTGTTC |
| 189 | AGTGCAGTCGCGATGGGAACTTCTTCTTTGCTTTA |
| 190 | ATGGCCATGCGAACCGAAACCTAGCCCATTTTCCTA |
| 191 | ATTGCGGTCATCCCCTTCCACGCTATACCACCAT |
| 192 | CACTGCAGGTCACTGGCGCCCTATTTCCTCACATT |
| 193 | CATGCCCGTAAACGCCTAATCTACCACCTTTTGCT |
| 194 | CATGCCGCCTTTCGACTTCCATATCCCAACACGCC |
| 195 | CATGCCGGTCATTCCATACTCAAACTCATTCACTC |
| 196 | CATGCGAGCTACCCTTATCATCTCATGTTTGCTTT |
| 197 | CATGCGATTGCGCCCCATTCCTTGCCTTATCTCAC |
| 198 | CATGCGCACATCGTACTCCGTAGCCCTAAATTATCA |
| 199 | CATGCGCCCTGTGCGTTCTCTACTACCCTAATCAT |
| 200 | CATGTACGCACACCCACTGATTCTTTACCACCCACTGA |
| 201 | GCAGGACACCCCCTCATTATTTGTTTCATCCTACG |
| 202 | GCATCAGGCGCACTTTCATTTGCTAATCGTTTTTT |
| 203 | GCCATGCGAGAGGGTTATTGTTGATCTCATGGGTT |
| 204 | GCGATAAAGCCCATGTAACCCTCTGAAAACCCGAT |
| 205 | GCGCCACGAGCTACCCGACTTCCGATTACTTTCTT |
| 206 | GCGGACATCGGGCACTTTATACAACCACCTTTTTG |
| 207 | GCTGCAGGCCGTCCCAAATATTCGCTCCCACACATA |
| 208 | GCTGGTCAGGCGTTCCACACTTCCTACCCGCTTTT |
| 209 | TATGCGCAGGACCACCTATTACACGACCTTATCCT |
| 210 | TCAACTGGGGTCAGTGCCAACGCTTACTTTCTTCT |
| 211 | TCAAGCAGTCATAGCCGGTTTCACGCTTTACTTAC |

TABLE 29
Negative Control Sequences

| SEQ | |
|---|---|
| ID | |
| NO. | Variable Region |
| 212 | AAAACACGCAAACTACCTGGAAACTTGACTTCTTT |
| 213 | AAAACACTCACGATACCTACCCTGGTCTTCACAAC |
| 214 | AAAACAGCAGGCATTTTCCTGTACTTTCGAATTCA |
| 215 | AAAACCACAGCTACCATTATCGCATTGGCCCTACT |
| 216 | AAAACCCAAGCACCGAACGAACTATCCCTTTTTCT |
| 217 | AAAACCCACCACGCGTCGTACGCATACCACCCTTT |
| 218 | AAAACCGGTCCTGCGCCTTCTTCTCCGCTTTTATT |
| 219 | CAGGTACTGTGGCAGGCGATCCATTGCTCTCTTTT |
| 220 | CAGGTCAGCAGTCCAGGCGATTACTTTCTCTTTTC |
| 221 | CAGTAACCGCTGTCTGTCATTTTTCAACATTCTGT |
| 222 | CAGTAACTGTAGTCGTCGAACCTTGCTTACAACCCA |
| 223 | CAGTAAGGAAGCTCATGCGGTACAGGTCTACCTCG |
| 224 | CAGTAAGTGCTGTCACTGCGCCACTTGTAAATACTTGA |
| 225 | CAGTAATGCGAAGCTAGTACGTTCTCTCTTATTTTA |
| 226 | CAGTACAAACATCGCGATTCTTTCCTTGATACTGT |
| 227 | GAGGGCGGCTCTAATGCATGCGCTTTCATCTTTGC |
| 228 | GAGGGCGGGCAGTCATTTCGATTATATCTGCCTACA |
| 229 | GAGGGCGGTCCAACGCGCAATGTCTTTTTTCTTCCGA |
| 230 | GAGGGCGTACAGGAGTCTTGCGGTCCACATTTTAT |
| 231 | GAGGGCTACTGAAGTTAATGGCATTCTTCTCTATC |
| 232 | GAGGGCTCATGCCAGCCGCTTTTCTTACCTTTATC |
| 233 | GAGGGCTGAACAAGTAGTGCGTACATTTTCCTTCCTGA |
| 234 | GAGGGCTGCAGGCATCCAATTTCCTCCTTGTCCCT |
| 235 | GAGGGGCCGTCCTTCGTACGGAATGTGCATGCGCT |
| 236 | GAGGGGCGGTCATTGCCGTTAGCCTCCTTTCGCCT |

[1191] The data described above (i.e., FIGS. 15A-F and Tables 27-29) were obtained with 1 ng input of the specified oligonucleotide libraries used to probe the various samples. In addition, probing experiments were performed with lower titers of the C-R7N oligonucleotide library, specifically 0.1, 0.01, 0.001 and 0.0001 ng. A total of 826 unique oligonucleotide sequences were detected between all titers. An eighth enrichment round (round 8) was performed with four titers of the library C-R7N-1 (i.e., 1 ng input in round 7): 1, 0.1, 0.01 and 0.001 ng input. From each titer, sets of oligonucleotides that passed the same filters described above were obtained. The composite set of oligonucleotides was compared to the sets of oligonucleotides obtained from the titrations of the C-R7N library noted above. The variable regions of 733 oligonucleotides observed in at least two of the five sets of oligonucleotides are listed in rank order by occurrence in SEQ ID NOs. 237-969. These oligonucleotides were identified as oligonucleotide probes that selectively bind to cancer samples. As in Table 27, the oligonucleotides were synthesized with a 5′ region consisting of the sequence (5′-CTAGCATGACTGCAGTACGT (SEQ ID NO. 131)) and a 3′ region consisting of the sequence (5′-CTGTCTCTTATACACATCTGACGCTGCCGACGA (SEQ ID NO. 132)) flanking the variable regions. The 733 cancer specific sequences which can be used to identify cancer samples along with those in Table 27 above.

[1192] As noted, next generation sequencing technologies can be used to identify and quantify members of the oligonucleotide library that bind to a sample. We also designed probes that can be used to identify and quantify members of the oligonucleotide library that bind to a sample without requiring a PCR step. This procedure relies on hybridization of the bound oligonucleotide with oligonucleotide-specific complementary probe. The complementary probe can directly or indirectly carry a tag that can be detected. For example, the oligonucleotide-specific complementary probe may carry a fluorescent tag. A general design is shown in FIG. 14G. In the figure, an individual member of the oligonucleotide library 1401 is bound by complementary probe 1402. Complementary probe 1402 consists of three sections from 5′ to 3′: 1) probe part B 1403; 2) probe complement 1404; and 3) probe part A 1405. The member of the oligonucleotide library 1401 is bound by complementary probe 1402 via base pair hybridization between the variable region of oligonucleotide library 1401 and the probe complement region 1404 of complementary probe 1402. Tag probe 1406 which is fluorescently labeled (indicated by the circles in the figure) and capture probe 1407 hydridize to the probe part A 1405 and probe part B 1403 of complementary probe 1402, respectively. These features allow for the capture of the entire complex (i.e., oligonucleotide library 1401, complementary probe 1402, tag probe 1406, and capture probe 1407) via the capture probe, combined with detection via the label of the tag probe 1406.

[1193] For these experiments, the complementary probes were designed to work with tag probe and capture probe supplied as part of the nCounter nucleic acid detection system from NanoString Technologies, Inc. (Seattle, WA). The complementary probes for nCounter quantification were designed as reverse complement to the top 50 oligonucleotide probe binders and 50 negative controls, described above. The complete sequences are shown in Table 30. In the table, the ID column is an identifier and the Type column indicates if the sequence is to a control oligonucleotide probe (“neutral”) or to a cancer binding oligonucleotide probe (“binder”). Each complete sequence comprises from 5′ to 3′: 1) 5′ Region (Probe Part B 1403); 2) Probe Complement Region 1404; and 3) 3′ Region (Probe Part A 1405), where region identification numbers correspond to FIG. 14G. The probe complement region may be shorter than the variable sequence of the corresponding oligonucleotide probe in order to optimize binding parameters (e.g., specificity and melting point). The probe complement region may also be so optimized to bind against the variable sequence of the corresponding oligonucleotide probe and also to at least a portion of its 5′ and 3′ flanking sequences (e.g., as shown in Tables 27-29 above). The oligonucleotides each have a 5′ region 1403 consisting of the sequence (5′-CGAAAGCCATGACCTCCGATCACTC (SEQ ID NO. 970)) 5′ of the Probe Complement Region 1404 and a 3′ region 1405 as shown in Table 30 located 3′ of the Probe Complement Region 1404. Probe Part A 1405 shown in FIG. 14G corresponds to SEQ ID NO. 971.

TABLE 30
Complementary Probe Sequences

| | | | 3′ Region |
|---|---|---|---|
| SEQ ID NO | Type | Probe Complement Region 1504 | (Probe Part A 1505) |
| 972 | neutral | CAAGTTTCCAGGTAGTTTGCGTGTTTTA | CCTCAAGACCTAAGCGACAGCGTG |
| | | CGTAC | ACCTTGTTTCA |
| 973 | neutral | CAGGGTAGGTATCGTGAGTGTTTTACGT | CATCCTCTTCTTTTCTTGGTGTTG |
| | | ACT | AGAAGATGCTC |
| 974 | neutral | GAAAGTACAGGAAAATGCCTGCTGTTTT | CACAATTCTGCGGGTTAGCAGGAA |
| | | ACGTAC | GGTTAGGGAAC |
| 975 | neutral | GAGACAGAGTAGGGCCAATGCGATAATG | CTGTTGAGATTATTGAGCTTCATC |
| | | | ATGACCAGAAG |
| 976 | neutral | GAGACAGAGAAAAAGGGATAGTTCGTTC | CAAAGACGCCTATCTTCCAGTTTG |
| | | GGT | ATCGGGAAACT |
| 977 | neutral | GACGCGTGGTGGGTTTTACGTAC | CGAACCTAACTCCTCGCTACATTC |
| | | | CTATTGTTTTC |
| 978 | neutral | GCGCAGGACCGGTTTTACGTAC | CCAATTTGGTTTTACTCCCCTCGA |
| | | | TTATGCGGAGT |
| 979 | binder | GAGACAGAAAGTCGCATGGGCAGTA | CTTTCGGGTTATATCTATCATTTA |
| | | | CTTGACACCCT |
| 980 | binder | AGTGGAGTTTAATTGGCCTTCAGTTACG | CAACAGCCACTTTTTTTCCAAATT |
| | | TACT | TTGCAAGAGCC |
| 981 | neutral | GAACGATTCGTAGGGTATGCATGTACGT | CACCGTGTGGACGGCAACTCAGAG |
| | | ACT | ATAACGCATAT |
| 982 | binder | AGTATCAACGCCGGCATGTACGTAC | CCTGGAGTTTATGTATTGCCAACG |
| | | | AGTTTGTCTTT |
| 983 | binder | TAAAGGGCGTGGCATGTCTACGTAC | CAGATAAGGTTGTTATTGTGGAGG |
| | | | ATGTTACTACA |
| 984 | binder | GAGACAGAACATTGGCACAGTAGAGATA | CTTCCTTCCTGTGTTCCAGCTACA |
| | | GGT | AACTTAGAAAC |
| 985 | binder | TAATGGCAGCCTTACGTACCTACGTACT | CATAAAATTGGTTTTGCCTTTCAG |
| | | | CAATTCAACTT |
| 986 | neutral | CGGGCGCACTGACTACGTAC | CTGGTCAAGACTTGCATGAGGACC |
| | | | CGCAAATTCCT |
| 987 | binder | GAGACAGGAAGGGCACCGTAGA | CTTTCGTTGGGACGCTTGAAGCGC |
| | | | AAGTAGAAAAC |
| 988 | neutral | CCATCGCGACTGCACTACGTACT | CCAGCAGACCTGCAATATCAAAGT |
| | | | TATAAGCGCGT |
| 989 | binder | GAGACAGTCAAGGCACAGTGGAGTAATG | CCTGCCAATGCACTCGATCTTGTC |
| | | | ATTTTTTTGCG |
| 990 | binder | GGTAGAGAATACAAGGGTCTGCAACTAC | CAAACTGGAGAGAGAAGTGAAGAC |
| | | GTAC | GATTTAACCCA |
| 991 | neutral | CGGTTCGCATGGCCATACGTAC | CGATTGCTGCATTCCGCTCAACGC |
| | | | TTGAGGAAGTA |
| 992 | neutral | GAAGGGGATGACCGCAATACGTACT | CTGAGGCTGTTAAAGCTGTAGCAA |
| | | | CTCTTCCACGA |
| 993 | neutral | CCAGTGACCTGCAGTGACGTACT | CTAGGACGCAAATCACTTGAAGAA |
| | | | GTGAAAGCGAG |
| 994 | binder | TGGAGTTCAACAATATCAGTTAGCAGTG | CCACGCGATGACGTTCGTCAAGAG |
| | | ACGTAC | TCGCATAATCT |
| 995 | neutral | CCTGCCACAGTACCTGACGTACT | CATTTGGAATGATGTGTACTGGGA |
| | | | ATAAGACGACG |
| 996 | neutral | CTGGACTGCTGACCTGACGTACT | CACAAGAATCCCTGCTAGCTGAAG |
| | | | GAGGGTCAAAC |
| 997 | neutral | GAAAAATGACAGACAGCGGTTACTGACG | CTTGACGTAGATTGCTATCAGGTT |
| | | TAC | ACGATGACTGC |
| 998 | neutral | AGGTTCGACGACTACAGTTACTGACGTA | CTTACAGATCGTGTGCTCATGACT |
| | | C | TCCACAGACGT |
| 999 | neutral | CGCATGAGCTTCCTTACTGACGTACT | CTTGGAGGAGTTGATAGTGGTAAA |
| | | | ACAACATTAGC |
| 1000 | neutral | GAGACAGTCAAGTATTTACAAGTGGCGC | CCTACGTATATATCCAAGTGGTTA |
| | | AG | TGTCCGACGGC |
| 1001 | neutral | GAGACAGTAAAATAAGAGAGAACGTACT | CAGCAAGAAGGAGTATGGAACTTA |
| | | AGCTTCGCATTA | TAGCAAGAGAG |
| 1002 | neutral | GGAAAGAATCGCGATGTTTGTACTGACG | CACCCCTCCAAACGCATTCTTATT |
| | | TAC | GGCAAATGGAA |
| 1003 | neutral | GGCGTTTACGGGCATGACGTAC | CCCGAAGCAATACTGTCGTCACTC |
| | | | TGTATGTCCGT |
| 1004 | neutral | GTCGAAAGGCGGCATGACGTAC | CCGGGAATCGGCATTTCGCATTCT |
| | | | TAGGATCTAAA |
| 1005 | neutral | GAGACAGGAGTGAATGAGTTTGAGTATG | CCGATCTTCATAACGGACAAACTG |
| | | GAATGAC | AACGGGCCATT |
| 1006 | binder | GTTAATGGAAGCTTGTCGCATGACGTAC | CGCTATGCAGACGAGCTGGCAGAG |
| | | T | GAGAGAAATCA |
| 1007 | neutral | ATGATAAGGGTAGCTCGCATGACGTACT | CATTCGCAACCATGTGAAGTAATG |
| | | | TGAGCGTACTT |
| 1008 | neutral | GGCGCAATCGCATGACGTACT | CACCAGTTAGCGTGGCGTATACCA |
| | | | TGTTGTTAACA |
| 1009 | neutral | GAGACAGTGATAATTTAGGGCTACGGAG | CCTGAATCAATAGAACAATATCAG |
| | | TACG | TTATGGCGGTG |
| 1010 | neutral | GAGACAGATGATTAGGGTAGTAGAGAAC | CGGTTGTTAATATGACAGGCCGCT |
| | | GCAC | AAAGACGTTCT |
| 1011 | binder | GAGACAGTTTGAATCATGAGTTTGTGAA | CCGTCTCAGATGAGTGGGTTAATC |
| | | AGCGT | AATCAAGTATG |
| 1012 | binder | GAGAGAATAGGACGTACGCATGACGTAC | CTGACACATTAGTAACGTCGGCAA |
| | | T | GCACTTAGTCG |
| 1013 | neutral | TGGGTGTGCGTACATGACGTACT | CGTGAACCAGATTATGTATGGACG |
| | | | CGCAATAGATA |
| 1014 | binder | GGTTTCCGCATTGCAGGACGTAC | CATACGAAATTTGAGCAAGCAATT |
| | | | GAAGGCTTAGA |
| 1015 | binder | CCCTGGCTCGCGACGTAC | CTATCAGCTAATAGGGTCGGCTCA |
| | | | ACAGTGTATCC |
| 1016 | binder | CAGTAGAGAACAAGTCGCACGACGTAC | CTATCAATTCGTGACCCCGATCAT |
| | | | CCAGTCCAGAA |
| 1017 | neutral | GAGACAGGCAAAGATGAAAGCGCATG | CTTGAGCTCTAGGCCCAAAACGAC |
| | | | CTTAATGGTCA |
| 1018 | neutral | TGCCCGCCCTCACGTAC | CTAGCCCAGATCCTACGAGATGAG |
| | | | CTACGTAACTA |
| 1019 | neutral | GTTGGACCGCCCTCACGTAC | CAAATGCACTCTATATGGAGGGAG |
| | | | AGTAGCTGGAT |
| 1020 | neutral | ACTCCTGTACGCCCTCACGTAC | CCTGGTCTAGGTATCTAATTCGTG |
| | | | GGTCGGGTACT |
| 1021 | neutral | GCCATTAACTTCAGTAGCCCTCACGTAC | CATTAGCTCGGATGCTATCAGCTT |
| | | | GCGCCTATTAT |
| 1022 | neutral | GAGACAGGATAAAGGTAAGAAAAGCGGC | CACGATCTGTATTTTGCACCTTTC |
| | | TG | GCTATGCTGAG |
| 1023 | neutral | GAGACAGTCAGGAAGGAAAATGTACGCA | CTGTGTCCGTCTATACGCATACTG |
| | | C | GTCCACATATA |
| 1024 | neutral | GAGACAGAGGGACAAGGAGGAAATTGG | CATGTTGGAGTTAACGGAGACCCG |
| | | | CCATCGTTTAC |
| 1025 | neutral | GGACGGCCCCTCACGTAC | CGCTCATTTTGAACATACGATTGC |
| | | | GATTACGGAAA |
| 1026 | neutral | ATGACCGCCCCTCACGTACT | CCTATGCATCATGTGCCTCACTAG |
| | | | GACATCATGCT |
| 1027 | binder | CACAGTAGAGGAATATGCGCTATCACGT | CCTAAATTGGGAAAAAAGGTTTTA |
| | | ACT | GCTATTGATGG |
| 1028 | binder | GAGACAGTCATTGGGCACGGTAGA | CTTCAGTTAAAGGCTATCTTGCTC |
| | | | CGCTCGTTCTC |
| 1029 | binder | GCACGGTAGAGAGTAGTTGCACGTAC | CTTAAAGCTATCCACGAATGTCAA |
| | | | AAATGTGGTTT |
| 1030 | binder | GAGACAGTATGAGATAAGCACAGTAGAG | CCCGAATGTATAATGCTGACGTTC |
| | | ATTGACATGT | TTGCTTTTGGC |
| 1031 | binder | GAGACAGTAGGGGCACGGTAGAG | CCTATTGAAGCAATCCTCTCCCCA |
| | | | ATACTTAAAAA |
| 1032 | neutral | GGGGGTGTCCTGCACGTAC | CTACGGTTACCGTCTTTATAAGTG |
| | | | AACAAAACCGG |
| 1033 | binder | GTAGAGTATCCACGCAAACTGCACGTAC | CTCTGTGAACTGTCATCGGTCCGA |
| | | | TCAATTAGTCT |
| 1034 | binder | GCACGGTAGAGTTCATGTATGCACGTAC | CTCCCCTTTCCCAAGTAAATGTAC |
| | | | GGGAATTATCG |
| 1035 | binder | GAGACAGGGCACGGTAGAGTAAAATAAT | CGCTTTATTATGTGTTCGTCTAAC |
| | | | GTGATCTGTTTCTGT |
| 1036 | neutral | AAAGTGCGCCTGATGCACGTAC | CCGAGTGCATGAGCTGTCTTTCAC |
| | | | ATGATACATCG |
| 1037 | binder | CTCGAGAACGATACTGTGGCACGTAC | CTATTTCTGTTCACGGATGAAGGC |
| | | | CTATATCAATG |
| 1038 | neutral | CCCTCTCGCATGGCACGTAC | CCATCCACTTTCATGGAAACAATA |
| | | | AGAGCAGGGAA |
| 1039 | binder | GAGACAGTCACGTCATTTCAGATGGCA | CACAAACTCACTACTACCAACAAC |
| | | | CTCACCAAAAA |
| 1040 | binder | GAGACAGTCAACCTTAATATAAGCACAG | CTCATGTCCTCTGTTAATCCAGCC |
| | | TAGAGTTACAAGTTC | TGAATATGCCA |
| 1041 | binder | GCACAGTAGAGTATTGGTCGCACGTAC | CAGAAATGTCACTCCCATGGTGGC |
| | | | TGATATAGAAA |
| 1042 | binder | GAGACAGAGGAGTGAGCACGGTT | CATGTCGAACCTTGGATAGGAGCG |
| | | | ACCGATTACGT |
| 1043 | neutral | GGTTACATGGGCTTTATCGCACGTACT | CTCAGGTTGTTACTTGAAGGGTTC |
| | | | AACACGAGCTC |
| 1044 | binder | GGTAGAGACAACTTGCGCACGTACT | CAGAAGATCAAAAAACGATCCCTG |
| | | | TCCATCAATAC |
| 1045 | binder | GAGACAGAATAAAGCACGGTGGAGACAA | CTTAGGCTACCAAATGAATTTAAA |
| | | TG | GCCAGCTGAAA |
| 1046 | binder | GAGACAGTAGGAAATAGGCACGGTAGAG | CCAATGCTTGCAGTATGTATCCTG |
| | | TT | ATCGTGCGTGC |
| 1047 | binder | AGGTCGGTGCGCACGTAC | CCTGCATTCTCATGGAAATGCAAT |
| | | | GGATTCATTCC |
| 1048 | binder | GTGTGGTGGCGCACGTACT | CCTGTTGCAGTATCACGTAAATAC |
| | | | CTACTTCGATA |
| 1049 | neutral | GAGACAGAAGAAAGTAATCGGAAGTCGG | CTAGCTGTTATGGCTATTGCTGAA |
| | | GTAG | ACAGCAAAATT |
| 1050 | binder | ACAGTAGAGTAATATAGTCCGCGCACGT | CCTTACGACTTCACTGCAATTGAC |
| | | AC | GATTCAGTTAA |
| 1051 | neutral | GAGACAGCAAAAAGGTGGTTGTATAAAG | CCTCATACCAATGTAAAGTATAGT |
| | | TGCC | TAACGCCCTGT |
| 1052 | binder | GAGACAGGATGGCACAGTGGAGTAAG | CATCTCCATGACTGCTTGAGCGGC |
| | | | TGGAGAATCTG |
| 1053 | binder | ACAGTAGAGGTCACCGCACGTAC | CTTTCGCCACCCATATAAACCCCA |
| | | | CTTCGTCCTCA |
| 1054 | binder | CGGTAGAGGTTCTGTACGCACGTAC | CAAGGCAGAGCAAATGTGACACTG |
| | | | TCTATCAGTAC |
| 1055 | binder | GGGAGGGGACGCACGTAC | CCTACATATATAGGAAAAGGGAAG |
| | | | GTAGAAGAGCT |
| 1056 | binder | GAGACAGGAAAATCGCATACGTCTTGCA | CCTTCTGGAATTTCTTCCTTTGAT |
| | | TAC | TTTGCCATTTT |
| 1057 | binder | GAGGTGGATCGGTCTAGCACGTAC | CTCCTAAGGTTGCTGATTTGGTTG |
| | | | TTGGAGACCCA |
| 1058 | binder | ACGGTAGAGCTAAGCTAGCACGTACT | CAAGGCCTAGCCTAAAGGTTCTTG |
| | | | CAGAGCAACAT |
| 1059 | neutral | CGGCCTGCAGCACGTACT | CCTAATTAGCTCTAGGAAACACAA |
| | | | CCCCGGGATTT |
| 1060 | neutral | GAACGCCTGACCAGCACGTAC | CTTGAGTTATACGGAACTTCGCAA |
| | | | AAGTATTCCCT |
| 1061 | binder | GAGACAGAAATGCACAGTAGAGTAAAAT | CCATCCATCAACAACTGCTCCAAC |
| | | ATCTTGCCTG | AGCCTTTCCAT |
| 1062 | binder | GAGACAGGCACAGTAGAGGTGAGGATA | CCGGCACAAGCAGACAAAATCAAC |
| | | | ATGGTCATTTA |
| 1063 | binder | GAGACAGGGCATAAAGGGCACAGTA | CGCTCACGTGATCTACCCTAGCTG |
| | | | ACCGCTAATGA |
| 1064 | binder | GAGACAGTCAAGGAGCACGGTAGAG | CTCTAACCTGCATACATATGGCAT |
| | | | TTAGTTGTTCA |
| 1065 | binder | GGCACGGTAGAGAAATCGCATAACGTAC | CCTTCTTGAAGACCTATGTAAAGA |
| | | | AACGGGTCACT |
| 1066 | neutral | GAGACAGAGGATAAGGTCGTGTAATAGG | CCATACGCATGACTACATTACAAC |
| | | TGG | GGGCCAGGAAG |
| 1067 | neutral | GAGACAGAGAAGAAAGTAAGCGTTGGCA | CAGGTCTCGATCTCGTACAAAACG |
| | | C | ACTATGACCAT |
| 1068 | neutral | CCGGCTATGACTGCTTGAACGTACT | CATGAACGTGTCGTGTTATGCAGC |
| | | | GGTATGTCGTG |
| 1069 | binder | GAGACAGTTTGGTGGCACGGTAGA | CGTCGTGTCTTAGACGACTGTGTG |
| | | | TGATTCTCGAG |
| 1070 | binder | GCGAAATGACTGCGCAACGTACT | CCACCGTTTTGCCAGTTCCACCAG |
| | | | TAACTGTAAGG |
| 1071 | binder | AGAGTACTACCGCCTGACAACGTACT | CGCCCTGGAACAACGGTTATATTC |
| | | | TCTGGCAGAAC |

### Example 27: Oligonucleotide Probes: Aggressive Breast Cancer, Non-Aggressive Breast Cancer, and Non-Cancer

[1194] This Example presents oligonucleotide probes identified in an oligonucleotide probe library enriched against plasma-derived microvesicles from patients with aggressive breast cancer, non-aggressive breast cancer, and non-cancer (breast biopsy-negative samples). The general methodology follows that in Example 26 above. Oligonucleotides were screened using plasma samples from 60 individuals with breast cancer and 60 individuals without breast cancer.

[1195] A combination of ultracentrifugation and PEG based partitioning of microvesicles from each input plasma sample. The F-TRin-35n-B 8-3s library as described herein was enriched against microvesicles from pooled plasma samples (cancer or non-cancer pools) which were isolated using ultracentrifugation. Subsequent enrichments were performed by isolating the microvesicles using PEG precipitation. As in Example 26, the input oligonucleotide library was exposed to positive, negative and again positive targets sequentially and then PCR amplified. We performed two parallel tracks of initial enrichment against pooled samples, one track where pooled cancer samples were considered positive and non-cancer samples were negative, and another track where pooled non-cancer samples were considered positive and cancer samples were negative. The enriched libraries resulting from each track were pooled together before probing individual patient samples in the following experiments.

Oligonucleotides that Distinguish Aggressive and Non-Aggressive Breast Cancer

[1196] We first identified oligonucleotides that distinguished between aggressive and non-aggressive breast cancer. For these experiments, the aggressive breast cancer patient samples were considered as positive samples (31 samples) and non-aggressive breast cancer patient samples were considered as negative samples (29 samples). The enriched libraries from above were subjected to the oligonucleotide probing assay on the individual cancer plasma samples. A two-step normalization procedure was performed to normalize the sum of the copy numbers for all oligonucleotides associated with the PEG-precipitated pellet. The copy number of each recovered oligonucleotide was divided by the total number of sequence reads for each sample, then multiplied by the mean of totals of all samples. This data treatment accounts for the different number of sequence reads for each patient even though the same amount of DNA library was added for each patient-sample. The final value for each oligonucleotide for each patient is the average of normalized copy numbers from three probing replicates. We excluded oligonucleotides with an average read-count across all patients <100, and subsequently selected among the remaining oligonucleotides only those that show a >20% CV across the 60 patient samples. This process resulted in approximately 12000 remaining oligonucleotides.

[1197] We compared patient profiles using clustering analysis with one minus Pearson correlation coefficients (1−P_{c}) as the distance measure. The resulting heat-map based on the number of oligonucleotide sequence counts allows for visualisation of similarities in oligonucleotide copy numbers among all patient samples. See FIG. 15. In the figure, the X-axis shows individual oligonucleotides and the Y-axis shows samples (aggressive or other (i.e., non-aggressive)). Oligonucleotides from the indicated Cluster 1 have relatively low counts for the majority of aggressive cancers. Oligonucleotides from the indicated Clusters 2 and 3 have relatively higher counts in a majority of aggressive cancer samples. It is noted that oligonucleotide probes that are observed at either higher or lower relative copy number in the advanced cancer samples versus non aggressive can be used as markers to distinguish these sample groupings. Oligonucleotides from the indicated Cluster 4 were more selective toward particular aggressive cancer samples, and were able to identify additional 12 advanced cancer samples that were missed by oligonucleotides in Clusters 1-3. Cluster 4 oligonucleotides may be useful for detecting particular subsets of aggressive cancers.

[1198] The distances between samples within each cluster are considerably smaller than the distance between the two clusters. As can be seen in FIG. 15, these two groups of samples have very different proportions of advanced cancer cases versus other; in cluster I, 15 of the 19 patients are advanced cancer cases (79%), while in cluster II, only 16 of 40 patients are advanced cases (40%). Fisher exact p-value equals 0.01 with an odds ratio of 4.9, indicating that the ratio of advanced to other cancer in these two clusters is statistically significant.

[1199] The SEQ ID NOs. of the variable regions from the oligonucleotides in Clusters 1-4 in FIG. 15 are shown in Table 31. As in Table 27, the oligonucleotides were each synthesized with a 5′ region consisting of the sequence (5′-CTAGCATGACTGCAGTACGT (SEQ ID NO. 131)) and a 3′ region consisting of the sequence (5′-CTGTCTCTTATACACATCTGACGCTGCCGACGA (SEQ ID NO. 132)) flanking the variable region. The sequences can be used in the identification of aggressive breast cancer samples.

TABLE 31
Clusters 1-4 Variable Regions SEQ ID NOs

| Cluster | SEQ ID NO |
|---|---|
| Cluster 4 | 1072-1121 |
| Cluster 3 | 1122-1171 |
| Cluster 2 | 1172-1221 |
| Cluster 1 | 1222-1421 |

[1200] A selection of 50 negative control oligonucleotides was made from the same experiments as above. As criteria, we chose those oligonucleotides with the lowest variability (% cv) between biological samples when taking all 120 samples from the noted probing into account. The variable regions of the 50 negative controls are listed in SEQ ID NOs 1422-1471. As in Table 27, the oligonucleotides were synthesized with a 5′ region consisting of the sequence (5′-CTAGCATGACTGCAGTACGT (SEQ ID NO. 131)) and a 3′ region consisting of the sequence (5′-CTGTCTCTTATACACATCTGACGCTGCCGACGA (SEQ ID NO. 132)) flanking the variable regions. These sequences can be used as negative controls when identifying aggressive breast cancer samples.

### Oligonucleotides Specific to Non-Cancer Samples Versus Cancer Samples

[1201] We also identified a set of oligonucleotides that were specific to the non-cancer plasma samples. In addition to probing the cancer samples noted above, the enriched oligonucleotide probe library was used to perform the probing test on the 60 individual non-cancer plasma samples. Each sample was probed as described above. The oligonucleotides recovered with each individual non-cancer and cancer plasma sample were identified using next-generation sequencing. The averaged frequencies of individual oligonucleotide sequence reads between non-cancer and cancer samples were used to calculate a fold-change of non-cancer versus cancer. Oligonucleotides with both read counts above 100 and fold change (non-cancer/cancer) greater or equal to 2 were identified as non-cancer specific oligonucleotide probes (SEQ ID NOs. 1472-1486). In addition, a selection of negative control oligonucleotides were selected as those with fold change less than or equal to 1 and read count below 20 (SEQ ID NOs 1487-1501).

[1202] The variable regions of the non-cancer specific oligonucleotides and negative control oligonucleotides are listed by rank order in SEQ ID NOs. 1472-1486 and SEQ ID NOs 1487-1501, respectively. As in Table 27, the oligonucleotides were synthesized with a 5′ region consisting of the sequence (5′-CTAGCATGACTGCAGTACGT (SEQ ID NO. 131)) and a 3′ region consisting of the sequence (5′-CTGTCTCTTATACACATCTGACGCTGCCGACGA (SEQ ID NO. 132)) flanking the variable regions. The sequences can be used to identify non-cancer samples (SEQ ID NOs. 1472-1486) or used as negative controls for such experiments (SEQ ID NOs 1487-1501).

### Oligonucleotides Specific to Cancer Samples Versus Non-Cancer

[1203] We then identified a set of oligonucleotides that were specific to the cancer plasma samples as compared to the non-cancer samples. Pooled cancer and non-cancer samples were probed as described above. The oligonucleotides recovered with each individual cancer and non-cancer plasma sample were identified using next-generation sequencing. The averaged frequencies of individual oligonucleotide sequence reads between cancer and non-cancer samples were used to calculate a fold-change of cancer versus non-cancer. Oligonucleotides with both read counts above 10 and fold change (non-cancer/cancer) greater or equal to 1.5 were identified as cancer specific oligonucleotide probes (SEQ ID NOs. 1502-1539). In addition, a selection of negative control oligonucleotides were selected as those with fold change less than or equal to 1 and read count below 20. See SEQ ID NOs 1487-1501 as described above.

[1204] The variable regions of the cancer specific oligonucleotides are listed by rank order in SEQ ID NOs. 1502-1539. As in Table 27, the full length oligonucleotides were synthesized with a 5′ region consisting of the sequence (5′-CTAGCATGACTGCAGTACGT (SEQ ID NO. 131)) and a 3′ region consisting of the sequence (5′-CTGTCTCTTATACACATCTGACGCTGCCGACGA (SEQ ID NO. 132)) flanking the variable regions. These sequences which can be used to identify cancer samples.

### Example 28: Oligonucleotide Probes: Aggressive Breast Cancer, Non-Aggressive Cancer and Non-Cancer/Healthy Blood Plasma Targets with UC and PEG

[1205] This Example builds on the work presented in Example 27. Based on the results of the probing Aggressive cancer pool (50% patients with aggressive breast cancer), Non-Aggressive cancer pool and Healthy Pool (50% biopsy confirmed non-cancer and 50% healthy non-cancer), we obtained aptamers specific for:

[1206] Aggressive cancer compared to non-aggressive cancer and to non-cancer/healthy samples.

[1207] Non-aggressive cancer compared to aggressive and to non-cancer/healthy samples.

[1208] Non-Cancer/Healthy samples compared to aggressive and non-aggressive samples.

[1209] A combination of ultracentrifugation and PEG based partitioning of microvesicles from each input plasma sample. This approach potentially provides a cleaner patient sample and thus provide higher specificity for the intended target. As in Example 27, the input oligonucleotide library was exposed to positive, negative and again positive targets sequentially and then PCR amplified. Enriched libraries were subjected to the oligonucleotide probing assay on the plasma samples using sample pools as follows: ACP—aggressive cancer pool; NACP—non-aggressive cancer pool; HP—healthy pool (mix of non-cancer and normal samples). Each sample pool was probed two naïve (i.e., untrained) oligonucleotide probe libraries (6-3S and 8-3S described herein) with three replicates. Samples were sequenced in multiplex with 9 samples per flow cell. Indexing PCR was performed either with or without internal standard. The average number of sequence read counts between three replicates was considered for fold change and TTEST calculations. Sequences were identified that met the following criteria: fold change between pools >=2; p-value=<0.05, % cv=<20%, counts >=100.

[1210] The joint selection of oligonucleotides that passed the above criteria is shown in Tables 32 and 33. As in Table 27, the oligonucleotides each have a 5′ region consisting of the sequence (5′-CTAGCATGACTGCAGTACGT (SEQ ID NO. 131)) and a 3′ region consisting of the sequence (5′-CTGTCTCTTATACACATCTGACGCTGCCGACGA (SEQ ID NO. 132)). Tables 32 and 33 list in rank order the SEQ ID NOs of the variable region that are positioned between the 5′ and 3′ regions. The differences are that the starting libraries were derived from a first round of enrichment against a cancer pool (Table 32) or a first round of enrichment against a non-cancer pool (Table 33). However, after the first round the aliquots were pooled for subsequent enrichment. The combined oligonucleotide probe library can be used to distinguish between aggressive breast cancer, non-aggressive breast cancer, and non-cancer plasma samples in a single assay according to the column “Comparison.” In the Comparison column, sequences elevated in group 1 as compared to group 2 are shown as group 1/group 2. The legend for this column is “ACP”: Aggressive cancer pool; “HP”: healthy & non-cancer pool; “NACP”: Non-aggressive cancer pool. “IntSt” in the comparison row indicates that an internal standard was used during the enrichment. By way of illustration, the first two sets of comparisons in Table 32 are labeled ACP/HP, which indicates that these oligonucleotides were observed at high copy numbers after probing the aggressive breast cancer sample pool versus the healthy/non-cancer sample pool. Continuing with this illustration, higher numbers of such oligonucleotide probes binding to a sample can indicate the presence of an aggressive breast cancer.

TABLE 32
Oligonucleotide Probe Comparison and Variable Regions

| Comparison | SEQ ID NO. |
|---|---|
| ACP/HP (IntSt) | 1540-1551 |
| ACP/HP | 1552-1585 |
| HP/ACP (IntSt) | 1586-1611 |
| HP/ACP | 1612-1650 |
| NACP/HP (IntSt) | 1651-1655 |
| NACP/HP | 1656-1733 |
| HP/NACP (IntSt) | 1734-1754 |
| HP/NACP | 1755-1789 |
| NACP/ACP (IntSt) | 1790-1793 |
| ACP/NACP (IntSt) | 1794-1805 |
| ACP/NACP | 1806-1815 |

TABLE 33
Oligonucleotide Probe Comparison and Variable Regions

| Comparison | SEQ ID NO. |
|---|---|
| ACP/HP (IntSt) | 1816-1822 |
| ACP/HP | 1823-2004 |
| HP/ACP (IntSt) | 2005-2054 |
| HP/ACP | 2055-2234 |
| NACP/HP (IntSt) | 2235-2242 |
| NACP/HP | 2243-2318 |
| HP/NACP (IntSt) | 2319-2356 |
| HP/NACP | 2357-2491 |
| NACP/ACP (IntSt) | 2492-2507 |
| NACP/ACP | 2508-2583 |
| ACP/NACP (IntSt) | 2584-2593 |
| ACP/NACP | 2594-2728 |

### Example 29: Oligonucleotide Probes: Non-Aggressive Cancer Probes Identified in Libraries Enriched with Multiple Protocols

[1211] This Example builds on the work presented in Example 28. Here, we identified a set of oligonucleotide probes specific for non-aggressive cancer samples. The oligonucleotide probes were identified based on probing using an aggressive cancer pool (ACP), non-aggressive cancer pool (NACP) and healthy pool (HP) of plasma samples with naïve oligonucleotide libraries. Compared to the work in Example 28, four different enrichment schemes were used, as further detailed below. For purposes of these experiments, non-aggressive (or non-advanced) cancer is defined as sample with tumor size not exceeding stage T1, presence of nodes NO, Metastasis MO and positive estrogen/progesterone receptors.

[1212] In each case, the enriched libraries were subjected to the probing test on pooled plasma samples. The library enrichment was performed as described herein, see e.g., Example 21. The libraries were exposed to positive and negative targets and PCR amplified either after each binding or after series positive-negative-positive binding as described below. The positive and negative pools are indicated below for the different enrichment schemes. After each round of enrichment, next generation sequencing was used to determine a copy number of the recovered oligonucleotide probes. Averaged frequencies of individual oligonucleotide between the indicate pools were used to calculate the fold change. Oligonucleotide with counts above 50, fold change >=2 and % cv between replicates below 20% were considered as candidates and shown in the tables below.

### Scheme 1

[1213] The positive target was the NACP plasma and the negative target was the HP plasma. The enrichment started with the naïve (non-enriched; NE) library. Microvesicles in the samples were isolated using ultracentrifugation in all stages. Each round of enrichment consisted of a complete set of positive-negative-positive binding events followed by PCR amplification of the enriched library. Two such rounds of binding were performed. The resulting library after the second enrichment (R2) is used for subsequent probing of the pooled samples (aggressive cancer, non-aggressive cancer and healthy). As in Example 28 above, comparisons performed included ACP/HP, HP/ACP, ACP/NACP, NACP/ACP, HP/NACP, NACP/HP.

[1214] Resulting oligonucleotides identified in these selections are shown in Table 34. As in Table 27, the oligonucleotides each have a 5′ region consisting of the sequence (5′-CTAGCATGACTGCAGTACGT (SEQ ID NO. 131)) and a 3′ region consisting of the sequence (5′-CTGTCTCTTATACACATCTGACGCTGCCGACGA (SEQ ID NO. 132)). Table 34 lists the SEQ ID NOs in rank order of the variable regions that are positioned between the 5′ and 3′ regions. The combined oligonucleotide probe library can be used to distinguish between aggressive breast cancer, non-aggressive breast cancer, and non-cancer plasma samples in a single assay according to the column “Comparison.” In the Comparison column, sequences elevated in group 1 as compared to group 2 are shown as group 1/group 2. The legend for this column is “ACP”: Aggressive cancer pool; “HP”: healthy & non-cancer pool; “NACP”: Non-aggressive cancer pool. By way of illustration, the first two sets of comparisons in Table 34 are labeled ACP/HP, which indicates that these oligonucleotides were observed at high copy numbers after probing the aggressive breast cancer sample pool versus the healthy/non-cancer sample pool. Continuing with this illustration, higher numbers of such oligonucleotide probes binding to a sample can indicate the presence of an aggressive breast cancer.

TABLE 34
Enrichment Scheme 1 Oligonucleotide
Probe Comparison and Variable Regions

| Comparison | SEQ ID NO. |
|---|---|
| HP/ACP | 2729-2737 |
| ACP/HP | 2738-2742 |
| ACP/NACP | 2743-2745 |
| NACP/ACP | 2746-2753 |
| NACP/HP | 2754 |
| HP/NACP | 2755-2763 |

### Scheme 2

[1215] In this enrichment, the positive target is NACP plasma and the negative target is the HP plasma. The starting input library is the C-R8N-1 (i.e., previously enriched for a cancer pool with 48% of aggressive cancer samples; see description of the C-RN7 library in Example 26 with one additional round of positive selection performed). The microvesicle partitioning was performed using PEG precipitation. PCR amplification is done after each binding. The resulting library after this ninth (Round 9) round of enrichment is used for probing. Three different input criteria for used for round 9: 1) R9-2—library input 0.1 ng; 2) R9-1c—library input is 1 ng; 3) R9—5× input of competitor DNA. The R9-2 and R9-1c oligonucleotide libraries were then used for subsequent probing of the pooled samples (aggressive cancer, non-aggressive cancer and healthy). As above, comparisons performed included ACP/HP, HP/ACP, ACP/NACP, NACP/ACP, HP/NACP, NACP/HP.

[1216] Resulting oligonucleotides identified from the R9-1c and R9-2 oligonucleotide libraries in these selections are shown in Table 35 and Table 36, respectively. As in Table 27, the oligonucleotides each have a 5′ region consisting of the sequence (5′-CTAGCATGACTGCAGTACGT (SEQ ID NO. 131)) and a 3′ region consisting of the sequence (5′-CTGTCTCTTATACACATCTGACGCTGCCGACGA (SEQ ID NO. 132)). Tables 35 and 36 list the SEQ ID NOs in rank order of the variable regions that are positioned between the 5′ and 3′ regions. When combined, the oligonucleotide probe libraries can be used to distinguish between aggressive breast cancer, non-aggressive breast cancer, and non-cancer plasma samples in a single assay according to the column “Comparison.” In the Comparison column, sequences elevated in group 1 as compared to group 2 are shown as group 1/group 2. The legend for this column is “ACP”: Aggressive cancer pool; “HP”: healthy & non-cancer pool; “NACP”: Non-aggressive cancer pool. By way of illustration, the first two sets of comparisons in Table 35 are labeled ACP/HP, which indicates that these oligonucleotides were observed at high copy numbers after probing the aggressive breast cancer sample pool versus the healthy/non-cancer sample pool. Continuing with this illustration, higher numbers of such oligonucleotide probes binding to a sample can indicate the presence of an aggressive breast cancer.

TABLE 35
Enrichment Scheme 2 R9-1c Oligonucleotide
Probe Comparison and Variable Regions

| Comparison | SEQ ID NO. |
|---|---|
| ACP/HP | 2764-2791 |
| HP/ACP | 2792-2793 |
| ACP/NACP | 2794-2815 |
| NACP/ACP | 2816-2830 |
| HP vs NACP | 2831-2845 |
| NACP vs HP | 2846-2858 |

TABLE 36
Enrichment Scheme 2 R9-2 Oligonucleotide
Probe Comparison and Variable Regions

| Comparison | SEQ ID NO. |
|---|---|
| ACP/HP | 2859-2867 |
| HP/ACP | 2868-2892 |
| ACP/NACP | 2893-2904 |
| NACP/ACP | 2905-2938 |
| HP/NACP | 2939-2941 |
| NACP/HP | 2942-2950 |

### Scheme 3

[1217] The positive target was the NACP plasma and the negative target was the HP plasma. The enrichment started with the naïve (non-enriched; NE) library. Microvesicles in the samples were isolated using PEG precipitation. Six rounds of enrichment were performed with PCR amplification performed after each round. The round alternated between a single selection of positive or negative selection (i.e., positive selection in rounds 1, 3, 5 and negative selection in rounds 2, 4, and 6). The resulting library after round 6 is used for probing of the pooled samples (aggressive cancer, non-aggressive cancer and healthy) with library input 0.1 ng. As above, comparisons performed included ACP/HP, HP/ACP, ACP/NACP, NACP/ACP, HP/NACP, NACP/HP.

[1218] Resulting oligonucleotides identified in these selections are shown in Table 37. As in Table 27, the oligonucleotides each have a 5′ region consisting of the sequence (5′-CTAGCATGACTGCAGTACGT (SEQ ID NO. 131)) and a 3′ region consisting of the sequence (5′-CTGTCTCTTATACACATCTGACGCTGCCGACGA (SEQ ID NO. 132)). Table 37 lists the SEQ ID NOs in rank order of the variable regions that are positioned between the 5′ and 3′ regions. The combined oligonucleotide probe library can be used to distinguish between aggressive breast cancer, non-aggressive breast cancer, and non-cancer plasma samples in a single assay according to the column “Comparison.” In the Comparison column, sequences elevated in group 1 as compared to group 2 are shown as group 1/group 2. The legend for this column is “ACP”: Aggressive cancer pool; “HP”: healthy & non-cancer pool; “NACP”: Non-aggressive cancer pool. By way of illustration, the first two sets of comparisons in Table 37 are labeled ACP/HP, which indicates that these oligonucleotides were observed at high copy numbers after probing the aggressive breast cancer sample pool versus the healthy/non-cancer sample pool. Continuing with this illustration, higher numbers of such oligonucleotide probes binding to a sample can indicate the presence of an aggressive breast cancer.

TABLE 37
Enrichment Scheme 3 Oligonucleotide
Probe Comparison and Variable Regions

| Comparison | SEQ ID NO. |
|---|---|
| ACP/HP | 2951-2960 |
| HP/ACP | 2961-2972 |
| ACP/NACP | 2973-2976 |
| NACP/ACP | 2977-2990 |
| HP vs NACP | 2991-3003 |
| NACP/HP | 3004-3017 |

### Scheme 4

[1219] Starting aptamer library is C-R8N-3 (library previously enriched for Cancer pool with 48% of aggressive cancer samples and input 0.001 ng). Microvesicles in the samples were isolated using PEG precipitation. PCR amplification is done after each binding. There was only negative target used (the NACP), which is unique for the selection scheme versus the three above. This enrichment was meant to further enrich C-R8N library toward aggressive cancer targets by removing oligonucleotides specific to non-aggressive targets. Four negative selection rounds were performed. Two different input criteria for used for probing after round 13 (R13): 1) R13-3—library input 0.01 ng; 2) R13-4—library input 0.001 ng. The R13-3 and R13-4 oligonucleotide libraries were then used for subsequent probing of the pooled samples (aggressive cancer, non-aggressive cancer and healthy). As above, comparisons performed included ACP/HP, HP/ACP, ACP/NACP, NACP/ACP, HP/NACP, NACP/HP.

[1220] The variable regions of the resulting oligonucleotides identified from the R13-3 and R13-4 oligonucleotide libraries in these selections are shown in Table 38 and Table 39, respectively. As in Table 27, the oligonucleotides each have a 5′ region consisting of the sequence (5′-CTAGCATGACTGCAGTACGT (SEQ ID NO. 131)) and a 3′ region consisting of the sequence (5′-CTGTCTCTTATACACATCTGACGCTGCCGACGA (SEQ ID NO. 132)). Tables 38 and 39 list the SEQ ID NOs in rank order of the variable regions that are positioned between the 5′ and 3′ regions. When combined, the oligonucleotide probe libraries can be used to distinguish between aggressive breast cancer, non-aggressive breast cancer, and non-cancer plasma samples in a single assay according to the column “Comparison.” In the Comparison column, sequences elevated in group 1 as compared to group 2 are shown as group 1/group 2. The legend for this column is “ACP”: Aggressive cancer pool; “HP”: healthy & non-cancer pool; “NACP”: Non-aggressive cancer pool. By way of illustration, the first two sets of comparisons in Table 38 are labeled ACP/HP, which indicates that these oligonucleotides were observed at high copy numbers after probing the aggressive breast cancer sample pool versus the healthy/non-cancer sample pool. Continuing with this illustration, higher numbers of such oligonucleotide probes binding to a sample can indicate the presence of an aggressive breast cancer.

TABLE 38
Enrichment Scheme 4 R13-3 Oligonucleotide
Probe Comparison and Variable Regions

| Comparison | SEQ ID NO. | Variable Region Sequence |
|---|---|---|
| ACP/HP | 3018-3030 | ACCATCGGGTCACGTAAAAGCGG |
| | | TTCTAATTTCTAA |
| HP/ACP | 3031-3043 | ACGCAGTGCCGCCGAATCCTGAT |
| | | CCCCTAACTTTC |
| ACP/NACP | 3044-3052 | ACCACTGAACTCATGGTACTAAT |
| | | CACACACCAATT |
| NACP/ACP | 3053-3061 | ACTGACTGCATACATCCGCATAT |
| | | TAAACCCGTATT |
| HP/ACP | 3062-3083 | ACGCCTGTACGATGTCCTCGGTC |
| | | TCATTTTATTTC |
| ACP/HP | 3084-3096 | ACTGCGGTCATCGAGTTACTGGC |
| | | TATTGCCTGACC |

TABLE 39
Enrichment Scheme 4 R13-4 Oligonucleotide
Probe Comparison and Variable Regions

| Comparison | SEQ ID NO. | Variable Region Sequence |
|---|---|---|
| ACP/HP | 3097-3099 | AATGCATTGCGTTATTTCAATTGAGG |
| | | CGTCCTAAAA |
| HP/ACP | 3100-3107 | CATACGCACGGTCCTCTACTATAATT |
| | | GTCCACCAA |
| ACP/NACP | 3108-3117 | AGCCCGTTGCTACGTTGCAGTAGGTG |
| | | TAACTTCACTGA |
| NACP/ACP | 3118-3130 | AGCGGTCACCGCCTATGGTTATTCAT |
| | | TTTTCTCTTA |
| HP/NACP | 3131-3141 | AGCCCGTTGCTACGTTGCAGTAGGTG |
| | | TAACTTCACTGA |
| NACP/HP | 3142-3150 | ACCACGTTGGTTATTGCCCTGCTTTG |
| | | AAGTCTTACGA |

### Example 30: Use of an Oligonucleotide Probe Library to Characterize Breast Cancer Samples

[1221] An oligonucleotide probe library comprising approximately 2000 different probe sequences was constructed and used to probe approximately 500 individual breast cancer and non-cancer samples. The probe sequences were derived from different screening experiments and are listed herein in SEQ ID NOs 137-969 and 1072-3150. The oligonucleotides listed in these tables were synthesized and pooled together. The samples were plasma samples from 212 breast cancer patients, 177 biopsy confirmed non-cancer patients, and 117 normal control patients (self-reported as non-cancer). Experiments details are as provided above. The plasma samples were contacted with the oligonucleotide probe library and microvesicles were isolated using PEG precipitation. Oligonucleotides that were recovered with the microvesicles were isolated. Next Generation Sequencing (Illumina HiSeq) was used to identify the isolated sequences for each sample.

[1222] Analysis of significance of difference identified 18 aptamers with p-values below 0.01 when compared Cancer/Normal, 15 aptamers with p-values below 0.001 when compared cancer/Non-Cancer, 28 aptamers with p-values below 0.001 when compared Non-Cancer/Normal.

[1223] Multi-oligonucleotide panels were next constructed using a cross-validation approach. Briefly, 50 samples were randomly withheld from the sample cohort. The performance of individual oligonucleotides to distinguish the remaining cancers and non-cancer/normals was determined using logistic regression methodology. Additional oligonucleotides were added iteratively and performance was assessed using logistic regression until further performance improvements were no longer obtained with additional oligonucleotides. The approach generally led to panels of approximately 20-100 different probe sequences. The constructed panels were then used to classify the 50 withheld samples and diagnostic performance was assessed using Receiver Operating Curve (ROC) analysis and estimation of the Area Under the Curve (AUC).

[1224] In approximately 300 rounds of cross-validation, the average AUC was 0.6, thus showing that the average performance was statistically better than random (i.e., AUC of 0.5) and that the probe library could distinguish breast cancer and non-breast cancer/normal patient samples. AUC values as high as 0.8 were observed for particular cross validations. FIGS. 16A-B illustrate a model generated using a training (FIG. 16A) and test (FIG. 16B) set from a round of cross validation. The AUC was 0.803. The variable regions of the sequences used to build this model are shown in Table 40. Another exemplary round of cross-validation is shown in FIGS. 16C-D. The AUC was 0.678.

[1225] The SEQ ID NOs. of the sequences used in the model in FIGS. 16A-B are listed in rank in Table 40. As in Table 27, the oligonucleotides were synthesized with a 5′ region consisting of the sequence (5′-CTAGCATGACTGCAGTACGT (SEQ ID NO. 131)) and a 3′ region consisting of the sequence (5′-CTGTCTCTTATACACATCTGACGCTGCCGACGA (SEQ ID NO. 132)) flanking the variable regions.

TABLE 40
Oligonucleotide Probe Variable Regions
Rank Ordered SEQ ID NOs

215, 1286, 961, 1837, 780, 1319, 3032, 626, 2816, 1311, 364, 3102, 3115, 886, 414, 517, 599, 246, 416,
223, 507, 586, 1455, 1560, 1241, 2771, 1513, 2994, 2757, 461, 1917, 1178, 299, 1409, 959, 785, 322,
636, 1244, 665, 592, 823, 168, 1183, 3000, 182, 534, 1580, 2753, 2989, 1957, 2829, 1960, 856, 3149,
283, 1551, 1974, 605, 363, 266, 3140, 2242, 1306, 652, 634, 2763, 1270, 1728, 893, 1266, 1372, 1141,
1731, 1197, 1649

[1226] The data presented in this Example demonstrate that an oligonucleotide pool comprising members having the variable regions listed in SEQ ID NOs 137-969 and 1072-3150, e.g., a pool of probes having the variable regions listed in Table 40, can be used to distinguish plasma from individuals having breast cancer versus plasma from non-breast cancer individuals.

### Example 31: Updated Oligonucleotide Pools to Characterize Breast Cancer Samples

[1227] The profiling of 500 clinical samples with an oligonucleotide probe library comprising 2000 oligonucleotides showed significant ability to distinguish breast cancer from non-cancer control samples. See Example 30 above. When performing cross-validation in these experiments, it was observed that 85 out of 500 were misclassified at a higher rate compared to the other samples. We therefore identified another selection of oligonucleotide probe which were able to correctly classify the noted samples. These 85 samples were profiled with a naïve oligonucleotide probe library (6-3S/8-3S), and enriched on breast cancer and non-cancer plasma using methodology presented in the Examples above. The selected oligonucleotides were compared to a positive controls cohort, which comprised of the cancer and non-cancer samples that were consistently classified correctly within the experiments in Example 30 above. Oligonucleotides were selected based on absolute number of copies sequenced of at least 50 and various criteria when comparing sample groups including: 1) copy number fold-change (fc) of at least 1.2; 2) effect size (es) above 0.6; 3) t-test (p-value <=0.05); and 4) Kolmogorov-Smirnov test (ks) (p-value <=0.05). Effect size is a population effect size calculated as (mean(group1) −mean(group2))/standard deviation(group1 and group2).

[1228] The profiling data were normalized by dividing the count of each particular oligonucleotide by the total counts for particular sample and multiplying by the global mean across the entire experiment. These normalized values were used to calculate the statistical criteria specified above to compare the following samples type: Misclassified Cancer (“C”), misclassified non-cancer (“NC”), positive control Cancer (“C-P”), positive control Non-Cancer (“NC-P”), misclassified Normal (“N”). The comparisons performed and numbers of resulting oligonucleotides are shown in Table 41. Negative controls are oligonucleotides that did not match any criteria and thus should not distinguish be any samples groups.

TABLE 41
Oligonucleotide probe candidates were
selected from the following comparisons

| Specificity | Total |
|---|---|
| C/NC-P* A** and C/NC-P B*** | 82 |
| C/NC-P A | 108 |
| C/NC-P B | 13 |
| Negative control | 60 |
| C-P/NC A C-P/NC B | 34 |
| C-P/NC A | 68 |
| C-P/NC B | 101 |
| NC/C-P A NC/C-P B | 7 |
| NC/C-P A | 196 |
| NC-P/C A NC-P/C B | 65 |
| NC-P/C A | 83 |
| NC-P/C B | 55 |
| C + C-P/N | 103 |
| N/C + C-P | 25 |
| Total | 1000 |

*“C/NC-P” in Table 41 means that oligonucleotides were selected with specificity toward cancer (“C”) while compared to Non-Cancer positive (“NC-P”) control.
A** - selection criteria: counts > 50, fc ≥ 1.2, es > 0.6, ttest p < 0.05,
B*** - selection criteria: counts > 200, estimated sample size < 71, fc > 1.2, ttest/ks test p < 0.05.

[1229] The sequences selected based on Table 41 are shown in Table 42. As in Table 27, the oligonucleotides each have a 5′ region consisting of the sequence (5′-CTAGCATGACTGCAGTACGT (SEQ ID NO. 131)) and a 3′ region consisting of the sequence (5′-CTGTCTCTTATACACATCTGACGCTGCCGACGA (SEQ ID NO. 132)). Table 42 lists in rank order the SEQ ID NOs of the variable regions that are positioned between the 5′ and 3′ regions. The column “Specificity” shows the specificity of the oligonucleotides based on the comparisons in Table 41.

TABLE 42
Oligonucleotide Probe Variable Regions

| Specificity | SEQ ID NO. |
|---|---|
| C/NC-P A and C/NC-P B | 3151-3232 |
| C/NC-P A | 3233-3340 |
| C/NC-P B | 3341-3353 |
| Negative control | 3354-3368 |
| C-P/NC A C-P/NC B | 3369-3402 |
| C-P/NC A | 3403-3470 |
| C-P/NC B | 3471-3571 |
| Negative control | 3572-3586 |
| NC/C-P A NC/C-P B | 3587-3593 |
| NC/C-P A | 3594-3789 |
| Negative control | 3790-3804 |
| NC-P/C A NC-P/C B | 3805-3869 |
| NC-P/C A | 3870-3952 |
| NC-P/C B | 3953-4007 |
| Negative control | 4008-4022 |
| C/N | 4023-4125 |
| N/C | 4126-4150 |

[1230] The 1000 selected oligonucleotides are synthesized as DNA with a 5′ biotinylation. The synthesized oligonucleotides are pooled with 1000 of the most informative aptamers from the profiling performed in Example 30 to create a further optimized oligonucleotide probing library that can be used to distinguish cancer and normal samples.

### Example 32: Comparison of Oligonucleotide Pools

[1231] In this Example, the performance of the oligonucleotide pool from Example 30 was compared to the performance of the oligonucleotide pool from Example 31 to characterize breast cancer samples. In this Example, the oligonucleotide pool from Example 30 is referred to as the 2000v1 and the oligonucleotide pool from Example 30 is referred to as the 2000v2. A random forest approach was used to analyze the data, which data was obtained for the 2000v1 library in Example 30. The 2000v2 data was obtained via tested on a cohort of 858 plasma samples which comprised some samples described in Example 30 with additional samples according to three groupings: 194 breast cancer positive, 382 breast cancer negative as confirmed by biopsy (“non-cancer”), and 282 self declared normals (“normal”).

[1232] ROC curves are shown in FIGS. 22A-D for the various settings. AUC values are shown above the curve and are statistically significant from random (i.e., AUC=0.5) in all cases. In FIG. 22A, the 2000v1 probe library was used to distinguish cancer samples versus biopsy confirmed non-cancer samples. In FIG. 22B, the 2000v2 probe library was used to distinguish the same sample groupings. A small improvement in AUC was observed with the 2000v2 probe library in this setting. In FIG. 22C, the 2000v1 probe library was used to distinguish cancer samples versus self-declared normal samples. In FIG. 22D, the 2000v2 probe library was used to distinguish the same sample groupings. A small decline in AUC was observed with the 2000v2 probe library in this setting. Highly stringent

[1233] The SEQ ID NOs. of the variable regions of informative oligonucleotides from the 2000v1 and 2000v2 libraries are listed in Table 43. As above, the oligonucleotides were synthesized with a 5′ region consisting of the sequence (5′-CTAGCATGACTGCAGTACGT (SEQ ID NO. 131)) and a 3′ region consisting of the sequence (5′-CTGTCTCTTATACACATCTGACGCTGCCGACGA (SEQ ID NO. 132)) flanking the variable regions. The listed oligonucleotides were used in the Random Forest modeling to generate AUC values, e.g., as shown in FIGS. 22A-D, and are listed in rank order. The row “Common” in Table 43 shows overlapping informative sequences from the 2000v1 and 2000v2 settings.

TABLE 43
Informative oligonucleotide probes

| Setting | SEQ ID NO. |
|---|---|
| 2000v1 | 1102, 624, 3032, 597, 2831, 1923, 706, 752, 1188, 238, 605, 2809, 651, 611, 2830, 1163, |
| | 1187, 1106, 421, 843, 1186, 1100, 1235, 3140, 173, 1243, 289, 178, 3035, 1080, 890, 1225, |
| | 1995, 508, 183, 435, 2584, 2795, 1814, 1924, 3075, 939, 1183, 431, 938, 1731, 1095, 446, |
| | 623, 1732, 3024, 216, 626, 672, 457, 830, 1497, 777, 610, 3038, 1460, 665, 1079, 148, 1445, |
| | 885, 1697, 1197, 1769, 965, 164, 838, 606, 3018, 493, 1830, 859, 2047, 1837, 404, 1693, |
| | 1201, 899, 264, 841, 1678, 1949, 628, 354, 1523, 3036, 495, 727, 1997, 676, 546, 1507, 615, |
| | 616, 3096, 1435, 1194, 1195, 698, 660, 1994, 1123, 290, 934, 428, 715, 751, 3064, 602, 345, |
| | 662, 1820, 586, 241, 929, 1136, 316, 803, 3095, 936, 1381, 537, 254, 1119, 1652, 1955, |
| | 1534, 2965, 496, 405, 757, 612, 145, 1248, 599, 942, 505, 907, 1353, 2786, 1509, 211, 1170, |
| | 736, 486, 815, 540, 1540, 1250, 3000, 2971, 348, 3108, 445, 1548, 1723, 888, 1284, 604, |
| | 858, 1372, 1083, 584, 767, 3135, 855, 2730, 805, 1557, 565, 1600, 920, 2330, 1977, 710, |
| | 1220, 1907, 441, 795, 1939, 1386, 908, 2986, 350, 552, 2953, 3134, 250, 765, 827, 1216, |
| | 526, 969, 1903, 693, 650, 1359, 789, 747, 826, 2002, 1291, 639, 1244, 573, 3119, 523, 594, |
| | 854, 898, 429, 1881, 569, 1538, 848, 738, 911, 669, 909, 329, 577, 2964, 272, 648, 1481, |
| | 1719, 816, 2981, 533, 2748, 1660, 3050, 755, 1706, 1504, 3059, 1276, 1547, 2732, 922, |
| | 2977, 2952, 1522, 1273, 1399, 1556, 2998, 853, 1256, 845, 625, 2005, 2987, 2985, 1327, |
| | 807, 923, 1500, 1331, 2497, 641, 1282, 1940, 629, 2970, 1150, 1915, 1862, 389, 1304, 2979, |
| | 3061, 1328, 2740, 819, 353, 396, 2983, 1164, 3029, 1566, 2041, 2972, 966 |
| 2000v2 | 4116, 171, 3280, 3401, 3879, 1175, 3291, 651, 3343, 592, 3110, 3682, 605, 3231, 3556, 389, |
| | 624, 399, 3173, 3483, 795, 3918, 211, 309, 3595, 4101, 3780, 1169, 803, 1392, 3332, 415, |
| | 3652, 1610, 3262, 163, 1477, 4044, 3319, 722, 3607, 3414, 564, 511, 826, 431, 4052, 3329, |
| | 692, 3153, 295, 1548, 635, 3900, 370, 3698, 342, 3545, 614, 178, 3699, 467, 3307, 770, |
| | 4055, 3912, 164, 3232, 4048, 2762, 3856, 2587, 421, 3683, 3000, 633, 3712, 3466, 3769, |
| | 3537, 4058, 4018, 2808, 4026, 3785, 4083, 3151, 1288, 4050, 3560, 3786, 1121, 3742, 3128, |
| | 4132, 1171, 3619, 3471, 566, 3751, 4110, 4091, 787, 1176, 3735, 538, 240, 3064, 2754, |
| | 3035, 199, 3777, 831, 1247, 1188, 3667, 3086, 3741, 3650, 1272, 3402, 3317, 3618, 1466, |
| | 1590, 3489, 3659, 1091, 3601, 4023, 1469, 1777, 2008, 4059, 1593, 4062, 205, 2838, 3087, |
| | 2835, 3661, 1661, 3551, 3612, 1322, 3629, 3789, 2017, 1325 |
| Common | 1188, 3064, 421, 624, 389, 803, 431, 826, 3035, 164, 178, 651, 3000, 1548, 211, 605, 795 |

[1234] The data presented in this Example demonstrate that an oligonucleotide pool comprising members having the variable regions listed in SEQ ID NOs 137-969 and 1072-4150, e.g., a pool of probes having the variable regions listed in Table 43, can be used to distinguish plasma from individuals having breast cancer versus plasma from non-breast cancer individuals.

### Example 33: Photo-Cleavable Biotin Mediated Purification of an Oligonucleotide Library

[1235] Tag probe and capture probe detection systems may have advantages in the read-out of oligonucleotide-based assays since such systems allow direct quantification of oligonucleotides without amplification. Amplification may introduce amplification bias, e.g., wherein some sequences are preferentially amplified versus others. One such system is the nCounter nucleic acid detection system from NanoString Technologies, Inc. (Seattle, WA). This system can be used to detect oligonucleotide probes of the invention. See, e.g., FIG. 14G and related discussion. Current applications of tag and capture probe detection systems include gene expression analysis, RNA:Protein analysis; single cell gene expression analysis; miRNA expression analysis, miRGE analysis, copy number variation analysis, lncRNA expression analysis; ChiP-String expression analysis. See, e.g., www.nanostring.com/applications/.

[1236] In this Example, we improved using the Nanostring system to detect the oligonucleotide probe libraries of the invention. As described above, a pre-enriched oligonucleotide probe library is contacted with a biological sample such as plasma, and microvesicles bound by various oligonucleotide probes are precipitated, e.g., with PEG. Thus, the oligonucleotide probe library is present in the mix with PEG/proteins. This mixture is compatible with PCR steps used for next-generation sequencing (NGS) preparation, but the Nanostring system may not detect probes in these mixtures. Without being bound by theory, this interference may be due to noted impurities with hybridization of the probes and other oligonucleotides used in purifications steps. We developed a protocol for purification of post-probing oligonucleotide probe library, which utilizes photo-cleavable (PC) Biotin (see, e.g., www.idtdna.com/site/Catalog/Modifications/Product/2291; references 1-4) and thus allows oligonucleotide probe detection using the Nanostring tag-capture system.

[1237] The steps of the purification of post-probing oligonucleotide probe library are shown in schematic 1700 in FIG. 17A and include the following: (i) modification of the 5′-end of each member of the oligonucleotide library with photocleavable-Biotin (PC-Biotin) 1701 via PCR with a PC-Biotinylated primer to create PC-Biotinylated aptamer library 1702; (ii) probing of plasma samples using the PC-Biotinylated oligonucleotide probe library followed by PEG precipitation as described herein, resulting in a pellet 1703 which contains, inter alia, bound oligonucleotide library members, proteins and microvesicles 1705, and PEG; (iii) heat denaturing of the re-suspended pellet to break oligonucleotide/protein interactions and make PEG less viscous before mixing with streptavidin beads 1704; (iv) after short incubation with streptavidin beads 1704 to allow library 1702 to bind to the beads 1706, washing of the beads to remove impurities; (v) UV photo-cleavage 1707 of the spacer between the PC-Biotin and oligonucleotide molecules, capturing the beads 1708 using a magnet and collecting the released oligonucleotide library 1709 in the solution; and (vi) Nanostring 1710 sample preparation according to the manufacturer's instructions. In FIG. 17A, “PCB” refers to photocleavable biotin, oligonucleotide library members are referred to as “AL,” “Str. Beads” refers to streptavidin beads, and “NS” refers to the Nanostring assay. The steps above are identified in the plot.

[1238] FIG. 17B show a 4% agarose gel with results of photocleavable biotin library cleavage test with Streptavidin protein. Lane 1 is a 50 bp DNA ladder and lane 10 is a Control with no biotin library with Streptavidin protein. The gel shows that both biotinylated (“B”) and photo-cleavable biotinylated (“PC-B”) modified oligonucleotides were bound to Streptavidin, which resulted in slower mobility in gel (lanes 4 and 5) as compared to the unbound oligonucleotides (lanes 2 and 3). After exposure to 365 nm UV radiation, the PC-B oligonucleotides were photo-cleaved, which resulted in faster mobility in gel and returning to the original molecular weight (i.e., before mixing with Streptavidin protein) (lanes 7-9, where minutes UV exposure are indicated). In contrast, no change to the B oligonucleotides was observed after 10 min exposure to UV (lane 8). These results demonstrate that the photocleavable biotin library can be captured by streptavidin beads and released by UV-mediated cleavage.

[1239] To test the workflow, a pool of plasma from patients with breast cancer and another pool of plasma from healthy donors were probed with an oligonucleotide library comprising 100 oligonucleotide probes, 50 of which were selected as cancer specific and other 50 were selected as equivalent binders to both types of samples (i.e., “neutral”). The Nanostring probe system 1720 was designed as in FIG. 17C. See FIG. 14G and description thereof for further details of the Nanostring probe system. The “Nanostring Probe A” 1722 and “Nanostring Probe B” 1727 were designed in part as reverse complements to the oligonucleotide probe library members of the invention (labeled “Aptamer” 1724 in the figure). As can be seen in FIGS. 17D-E, relevant Nanostring counts were obtained for the photocleavable oligonucleotide library (min relevant count is 300). Furthermore, the oligonucleotide probes selected as binders (“Binder”) for the cancer pool (“CP”), indeed show stronger binding to the cancer pool as compared to counts from healthy pool (“HP”). The binding ratio between cancers and normal was ˜5.25. For oligonucleotide probes selected as neutral binders (“Neutral”), there was no relevant difference between the cancer pool and healthy pool.

[1240] The Nanostring protocol uses hybridization of target specific probes. We tested 100 different oligonucleotide probes, which are complementary to portion of each specific oligonucleotide, as well as universal Primer probe for Nanostring detection using the above procedure. Following the standard Nanostring detection protocol, all probes were mixed with recovered and purified library, hybridized overnight and efficiently detected using the Nanostring tag-capture probe approach. In contrast, without purification no quantification of oligonucleotides with Nanostring was observed (data not shown).

[1241] In this Example, we established a process for oligonucleotide probe library purification after probing test samples. This process is efficient, low cost, can be accomplished in short time frame, and can be used for any purpose when library needs to be purified from probing product directly and quickly, given no biotin labeling is needed in downstream applications.

### REFERENCES

[1242] 1. Photocleavable biotin derivatives: a versatile approach for the isolation of biomolecules. Proc Natl Acad Sci USA. 1995, 16, 7590-7594.
[1243] 2. Photocleavable biotin phosphoramidite for 5′-end-labeling, affinity purification and phosphorylation of synthetic oligonucleotides. Nucleic Acids Res. 1996, 2, 361-366.
[1244] 3. Photocleavable affinity tags for isolation and detection of biomolecules. Methods Enzymol. 1998, 291, 135-154.
[1245] 4. Matrix-assisted laser desorption/ionization mass spectrometry of DNA using photocleavable biotin. Biomol Eng. 1999, 16, 127-133.

### Example 34: Single Stranded DNA (ssDNA) Oligonucleotide Library Preparation for Library Development

[1246] The preparation of high yield and high quality ssDNA libraries is a critical step in SELEX (Systematic Evolution of Ligands by EXponential enrichment) [1, 2] as well as in other biological applications, such as DNA chips and microarrays [3], and single-stranded conformation polymorphism technique (SSCP) [4]. The standard approach for preparing ssDNA libraries includes PCR amplification to first generate a double stranded (dsDNA) library, followed by ssDNA separation and purification. Several strategies of ssDNA preparation have been developed to date, each with advantages and disadvantages:

### Lambda Exonuclease Digestion [2, 5-7]

[1247] The dsDNA standard PCR product is followed by Lambda exonuclease to digest the complementary strand and leave the target ssDNA. ssDNA purification is then performed to remove enzymes and unwanted buffer.

[1248] Advantages: Regular PCR amplification has high yield in generating dsDNA.

[1249] Disadvantages: The purity of final ssDNA is limited by enzyme digestion efficiency. Also dsDNA needs to be purified prior to digestion, together with post-digestion purification there will be two purifications, which results in substantial loss of input material. The digestion usually requires at least 2 hours. The digestion rate may not be consistent.

### Asymmetric PCR [8, 9]

[1250] The procedure generates target ssDNA as the main product and less dsDNA products and non-target ssDNA. The band corresponding to the target ssDNA is cut from a native gel.

[1251] Advantages: The final ssDNA product potentially has high purity.

[1252] Disadvantages: Separation of strands is possible in the native gel, but the yield is typically low and the presence of non-target strand cannot be excluded. The yield cannot be increased on denaturing gel because the strands have the same length.

### Biotin-Streptavidin Magnetic Beads Separation [10, 11]

[1253] The non-target PCR primer is biotinylated so final PCR products are Biotinylated-dsDNA, which can be captured by streptavidin magnetic beads and denatured to release the non-biotin labeled target ssDNA.

[1254] Advantages: The final ssDNA product has relatively high purity.

[1255] Disadvantages: In most cases, the input library needs to be biotinylated, but it may be difficult to replace or release the captured target strands from streptavidin beads. Post-denaturing purification is required to remove NaOH and/or acid used for neutralization.

### Unequal Primer Length PCR [12]

[1256] The non-target PCR primer has a chemical modified spacer and a few extra nucleotides following. In the PCR reaction, the DNA polymerase will stop at the spacer, resulting in unequal length of PCR dsDNA product. Then target ssDNA can be cut from a denaturing PAGE gel.

[1257] Advantages: The final ssDNA product has high purity because the target ssDNA is not mixed with non-target strands.

[1258] Disadvantages: ssDNA cannot be seen on native gel. Requires time consuming denaturing PAGE gel. It may be difficult to denature some dsDNA library, which can limit the final yield.

### Indirect Purification Method [13]

[1259] The indirect purification strategy combines Asymmetric PCR and Biotin-streptavidin magnetic beads separation. In short, regular PCR is used to generate sufficient template, then asymmetric PCR with excess of target primer and less biotinylated complementary primers, followed by biotin-streptavidin separation.

[1260] Advantages: May increase yield and purity of ssDNA product.

[1261] Disadvantages: It cannot produce biotinylated target ssDNA library. The process is relatively long and complicated and may be prone to generate mutants of the original sequence.

[1262] The invention provides methods of enriching oligonucleotide probe libraries against a target of interest. As the probes comprise ssDNA, the process may comprise PCR amplification then conversion back into ssDNA after each round of enrichment. In this Example, we developed a strategy for preparation of a ssDNA oligonucleotide library. The goals were to develop a process that is efficient and quick, while delivering high quality/purity ssDNA. We aimed to combine PCR and ssDNA prep in one step, remain efficient in the presence of selection buffer, target molecules, other sample components (e.g., highly abundant proteins for plasma samples) and other assay components (e.g., PEG precipitation solution that may be used to precipitate microvesicles). In addition, we desired the method to be able to generate ssDNA library with any modification, including without limitation Biotin.

[1263] We have used an optimized version of Lambda exonuclease digestion protocol for preparation of ssDNA oligonucleotide library. However, the digestion yield limits the overall recovery and is not consistent between different library preparations. In some cases, the ssDNA band is hardly visible on the gel following digestion. We have also observed incomplete digestion of dsDNA in the ssDNA product. In this Example, we developed an alternative protocol, termed “ssDNA by Unequal length PRimer Asymmetric PCR,” or SUPRA. It lacks disadvantages from the known methods listed above, and provides high quality and yield up to 10× higher yield of ssDNA oligonucleotide library as compared to the previous methods. It is relatively fast and convenient technically, since target ssDNA can be distinguished from non-target DNA on a gel.

[1264] A schematic comparing standard PCR 1800 and unequal length PCR 1810 is shown in FIG. 18A. In regular PCR 1800, a formard primer 1801 and reverse primer 1803 are hybridized with the reverse strand of an aptamer library 1802. The PCR reaction is performed, thereby creating equal length forward 1804 and reverse strands 1802. The strands are denatured in equal length single strands 1805. In unequal length PCR 1801, a formard primer 1811 having a lengthener segment and terminator segment and a reverse primer 1813 are hybridized with the reverse strand of an aptamer library 1812. The PCR reaction is performed, thereby creating unequal length forward 1814 and reverse strands 1812. The strands are denatured into unequal length single strands 1814 and 1812 that can be separated by size, e.g., on a denaturing gel.

[1265] The steps of SUPRA include: (i) Modification of regular non-target primer with two Isp9 (Internal Spacer 9; triethylene glycol spacer) as terminator and 32 extra nucleotides (e.g., poly-A) as lengthener. It is referred as Unequal-Forward-Double isp9 primer (UF-D9); (ii) Perform asymmetric PCR, by mixing DNA template, UF-D9 and regular target (reverse) primer at ratio that favors the reverse primer, e.g., 1:37.5. The PCR program has longer elongation step (e.g., 3 min instead of standard 1 min) and more cycles due to linear amplification mode (instead of exponential). The PCR product contains a majority of target ssDNA and small portion of dsDNA. (iii) Mix PCR reaction products 1:1 with denaturing buffer (e.g., 180 mM NaOH and 6 mM EDTA) and denature samples by heating (e.g., 70° C. for 10 min) and cooling (e.g., incubation on ice for 3 min); (iv) Run denatured products in denaturing buffer on an agarose gel stained with SybrGold. The non-target strand, which is longer due to the lengthener, will appear as upper band (if visible) and the target strand (strong lower band) is cut and purified. The process can include optional steps, including without limitation: (v) Weigh the gel pieces and purify ssDNA from the gel pieces (e.g., using the ssDNA Nucleospin kit or the like); (vi) quantification of the yield and native gel can be used to check the purity and yield of final product (e.g., using the ssDNA Qubit kit or the like).

[1266] The first step (i) uses a specific design of the forward primer with efficient terminator and lengthener, which creates non-target strand of unequal length. The DNA polymerase used to build the target strand will stop polymerization once it reaches the terminator, and the lengthener facilitates differentiation between the target and non-target strands. In the second step (ii), the ratio between the two primers is shifted toward the reverse primer, to produce a majority of target ssDNA. The ratio, however, should not limit double strand templates production to keep reaction running. FIG. 18B is a gel showing titration of forward and reverse primers input in asymmetrical PCR. The optimal condition, at which target strand is clearly visible, is in the range 1:20-1:50 F:R primers ratio. As shown in the figure, the ratio between two primers in asymmetric PCR can affect dsDNA and ssDNA amount in final products. The PCR thermocycler program is also adjusted to provide efficiency in the asymmetric PCR. In the third step (iii), a reliable denaturing method is used to separate target ssDNA to ensure the final yield and high purity.

[1267] As desired, the final step (vi) estimates the ratio of residual dsDNA, e.g., using ssDNA Qubit kit. In cases where the yield is not critical, the denaturing steps (iii and iv) can be skipped and the PCR products can be directly run on native gel. There will be a dsDNA band, but lower MW target ssDNA band can be distinguished and purified from gel. This is also a way to visualize the target band directly after PCR for a quality check or purification without denaturing. The purity of final product will be the same but yield will be lower.

[1268] A comparison of native versus denatured gel purification is shown in FIG. 18C. A post-probing oligonucleotide probe library was PCRed using unequal length primers mixed at a ratio of 1:38 (Forward/Reverse). In the figure, the left lane on each gel is a 50 bp molecular weight ladder and the lower band is the reverse primer. The positions of the dsDNA and ss DNA are indicated. A native gel showed the presence of both dsDNA and ssDNA (target strand) (FIG. 18C, panel A). Here, part of the target reverse strand is migrating in dsDNA. Thus, using the native gel, one can purify target ssDNA with moderate recovery. When a higher yield is desired, the PCR products can be run on denaturing agarose gel as described above. This approach provides maximal recovery wherein only target strand is visible, and can be cut from gel and purified (FIG. 18C, panel B). In this case, the reverse strand ssDNA, which is part of the dsDNA on native gel (FIG. 18C, panel A), is denatured and migrates together with other free molecules of target ssDNA strand, while forward strand becomes invisible due to limited amplification.

[1269] Compared to standard asymmetric PCR, which has relatively low yield and does not allow to distinguish target and non-target strands on denaturing gel, SUPRA delivers different lengths of target and non-target that can be purified on both native gel and denaturing gels. Compared to unequal primer length PCR, which uses lengthy Urea-PAGE protocol and produces only dsDNA, SUPRA has less dsDNA and free target ssDNA can be cut even from native gel if yield is not critical.

[1270] SUPRA has been used in the oligonucleotide probe library enrichment methods provided by the invention. The method is robust. In the presence of enrichment buffer, target/non-target molecules, proteins, exosomes/microvesicles, PEG and other components, SUPRA provides high quality and quantity of the ssDNA oligonucleotide library.

### REFERENCES

[1271] 1. Comparison of different methods for generation of single-stranded DNA for SELEX processes. Anal. Bioanal. Chem. 2012, 404, 835-842.
[1272] 2. Upgrading SELEX Technology by Using Lambda Exonuclease Digestion for Single-Straded DNA Generation. Molecules 2010, 15, 1-11.
[1273] 3. Tang, K.; Fu, D. J.; Julien, D.; Braun, A.; Cantor, C. R.; Koster, H. Chip-based genotyping by mass spectrometry. Proc. Natl. Acad. Sci. USA 1999, 96, 10016-10020.
[1274] 4. Kuypers, A. W.; Linssen, P. C.; Willems, P. M.; Mensink, E. J. On-line melting of double-stranded DNA for analysis of single-stranded DNA using capillary electrophoresis. J. Chromatogr. B Biomed. Appl. 1996, 675, 205-211.
[1275] 5. Higuchi, R. G.; Ochman, H. Production of single-stranded DNA templates by exonuclease digestion following the polymerase chain reaction. Nucleic Acids Res. 1989, 17, 5865.
[1276] 6. Jones, L. A.; Clancy, L. E.; Rawlinson, W. D.; White, P. A. High-affinity aptamers to subtype 3a hepatitis C virus polymerase display genotypic specificity. Antimicrob. Agents Chemother. 2006, 50, 3019-3027.
[1277] 7. S. S. Oh, K. Ahmads, M. Cho, Y. Xiao, H. T. Soh, “Rapid, Efficient Aptamer Generation: Kinetic-Challenge Microfluidic SELEX,” presented in the 12th Annual UC Systemwide Bioengineering Symposium, Jun. 13˜15, 2011, Santa Barbara, U.S.A
[1278] 8. Gyllensten, U. B.; Erlich, H. A. Generation of single-stranded DNA by the polymerase chain reaction and its application to direct sequencing of the HLA-DQA locus. Proc. Natl. Acad. Sci. USA 1988, 85, 7652-7656.
[1279] 9. Wu, L.; Curran, J. F. An allosteric synthetic DNA. Nucleic Acids Res. 1999, 27, 1512-1516.
[1280] 10. Espelund, M.; Stacy, R. A.; Jakobsen, K. S. A simple method for generating single-stranded DNA probes labeled to high activities. Nucleic Acids Res. 1990, 18, 6157-6158.
[1281] 11. A. Paul, M. Avci-Adali, G. Ziemer, H. P. Wendel. Streptavidin-coated magnetic beads for DNA strand separation implicate a multitude of problems during cell-SELEX. Oligonucleotides 2009, 19, 243-254.
[1282] 12. Williams K., Bartel D. PCR product with strands of unequal length. Nucleic Acids Research, 1995, Vol. 23, No. 20.
[1283] 13. Indirect purification method provides high yield and quality ssDNA sublibrary for potential aptamer selection. Anal. Biochem. 2015, online available.

### Example 35: Anti-C1q Oligonucleotides

[1284] This Example presents identification of anti-C1q aptamers. In this Example, biotinylated forms of the oligonucleotides identified in Example 27 were synthesized and immobilized to streptavidin beads and incubated with the PEG precipitated plasma fraction. Proteins that immunoprecipitated with oligonucleotides from SEQ ID NO. 1472-1486 were separated by SDS-PAGE. Specific bands were excised from the gel and proteins therein identified by in-gel trypsin digestions and LC-MS/MS such as in Example 23 above.

[1285] Immunoprecipitation of specific oligonucleotides conjugated to magnetic beads was performed to identify oligonucleotide targets. Several oligonucleotides were identified that recognized C1q and subunits. The sequences of the variable regions of identified anti-C1q aptamers include 5′-ACTATAGAACAATCCACCGCTTTAAATCAACTATCTTA (SEQ ID NO. 1472), also known by the identifier 83A-BA; 5′-TACCCCTGACAATCCTCGCGCCGAGGCCTCCATCCTGA (SEQ ID NO. 1475), also known by the identifier 83-B4; 5′-GATTTTAAAACCCTTGCACCTGATTGTGCCAATCCA (SEQ ID NO. 1477), also known by the identifier 83S-B6; and 5′-AACCCAATTCACATACACTCTCACCCCCACTAAACA (SEQ ID NO. 1482), also known by the identifier 83S-B11. Of note, the variable regions of 83S-B1 and 83S-B4 share the motif 5′-ACAATCC, suggesting that this may comprise a consensus sequence that facilitates binding to C1q. Further as noted below, an oligonucleotide comprising the reverse complement of this putative consensus sequence did not bind C1q. Several variants of the anti-C1q aptamers were also identified in the experiments of Example 27. The sequences of the variable regions thereof are shown in Table 44. As above, the full length oligonucleotide probes in Table 44 each had a 5C region consisting of the sequence (5′-CTAGCATGACTGCAGTACGT (SEQ ID NO. 131)) and a 3′ region consisting of the sequence (5′-CTGTCTCTTATACACATCTGACGCTGCCGACGA (SEQ ID NO. 132)). Table 44 shows the variable region that is positioned between the 5′ and 3′ regions of the sequences.

TABLE 44
Anti-C1q Variable Regions

| | |
|---|---|
| | SEQ ID |
| Variable Region | NO. |

83S-B1 (SEQ ID NO. 1472) and variants below

| | |
|---|---|
| ACTATAGAACAATCCACCGCTTTAAATCAACTATCTTA | 1472 |
| ACTATAGAACAATCCACCGCTTTAAATCAACTATCTGA | 4152 |
| ACTATAGAACAATCCACCGCTTTAAATCAACTATCTCA | 4153 |
| ACTATAGAACAATCCACCGCTTTAAATCAACTATCTAA | 4154 |
| ACTATAGAACAATCCACCGCTTTAAATAAACTATCTGA | 4155 |
| ACTATAGAACAATCCACCTCTTTAAATCAACTATCTGA | 4156 |
| ACTATAGAACAATCCACCGCTTTAAATCAACTATCCGA | 4157 |
| AATATAGAACAATCCACCGCTTTAAATCAACTATCTGA | 4158 |
| ACTATAGAACAATCCACCGCTTTAAATCAACTATCCTA | 4159 |
| ACTATAGAACAATCCACCTCTTTAAATCAACTATCTTA | 4160 |
| ACTATAGAACAATCCCCCGCTTTAAATCAACTATCTGA | 4161 |
| ACTATAGAACAATCCGCCGCTTTAAATCAACTATCTGA | 4162 |
| ACTATAGAACAATCCTCCGCTTTAAATCAACTATCTGA | 4163 |
| ACTATATAACAATCCACCGCTTTAAATCAACTATCTGA | 4164 |

83S-B4 (SEQ ID NO. 1475) and variants below

| | |
|---|---|
| TACCCCTGACAATCCTCGCGCCGAGGCCTCCATCCTGA | 1475 |
| TACCCCTGACAATCCTCGCGCCGAGGCCTCCATCCTCA | 1485 |
| TACCCCTGACAATCCTCGCGCCGAGGCCTCCATCCTAA | 4165 |
| TACCCCTGACAATCCTCGCGCCGAGGCCTCCATCCTAA | 4166 |

83S-B6 (SEQ ID NO. 1477) and variants below

| | |
|---|---|
| GATTTTAAAACCCTTGCACCTGATTGTGCCAATCCA | 1477 |
| GATTTTAAAACCCTTGCACCTGATTGTGCCAATCAA | 4167 |
| GATTTTAAAACCCTTGCACCTGATTGTGCCAATCGA | 4168 |
| GATTTTAAAACCCTTGCACCTGATTGTGCCAATCTA | 4169 |

83S-B11 (SEQ ID NO. 1482) and variants below

| | |
|---|---|
| AACCCAATTCACATACACTCTCACCCCCACTAAACA | 1482 |
| AACCCAATTCACATACACTCTCACCCTCACTAAACA | 4170 |
| AACCCAATTCACATACACTCTCACCCTCACTAAAAA | 4171 |
| AACCCAATTCACATACACTCTCACCCTCACTAAAGA | 4172 |
| AACCCAATTCACATACACTCTCACCCTCACTAAATA | 4173 |
| AACCCAATTCACATACACTCTCACCCTCACTAACCA | 4174 |
| AACCCAATTCACATACACTCTCACCCTCACTAACAA | 4175 |
| AACCCAATTCACATACACTCTCTCCCTCACTAAACA | 4176 |
| AACCCAATTCACATACACTCTCCCCCTCACTAAACA | 4177 |
| AACCCAATTCACATACACTCTCGCCCTCACTAAACA | 4178 |
| AACCCAATTCACATACTCTCTCACCCTCACTAAACA | 4179 |
| AACCCAATTCACATAAACTCTCACCCTCACTAAACA | 4180 |
| AACCCAATCCACATACACTCTCACCCTCACTAAACA | 4181 |
| AACCCAATTCACATACACTCTCACCCTCACTAAACC | 4182 |
| AACCCAATTCACATACGCTCTCACCCTCACTAAACA | 4183 |
| AACCCAATTCACATACACTCTCTCCCTCACTAAAAA | 4184 |
| AACCCAATTCACATACCCTCTCACCCTCACTAAACA | 4185 |
| AACCCAATTCACATACACTCTCGCCCTCACTAAAAA | 4186 |
| AACCCAATTCACATACACTCTTACCCTCACTAAACA | 4187 |
| AACCCAATACACATACACTCTCACCCTCACTAAACA | 4188 |
| AACCCAATTCACATACACTCTCACCCTCTCTAAACA | 4189 |
| AACCCAATTCACATACACTCTCCCCCTCACTAAAAA | 4190 |
| AACCCAATTCACATACCCTCTCACCCTCACTAAAAA | 4191 |
| AACCCAATTCACATACACTCTCACCCTCACTAAACT | 4192 |
| AACCCAATTCACATACACCCTCACCCTCACTAAACA | 4193 |
| AACCCAATTCACATACTCTCTCACCCTCACTAAAAA | 4194 |
| AACCCAAT'CACATACACTCTCACCCTCACTAAACA | 4195 |
| AGCCCAATTCACATACACTCTCACCCTCACTAAACA | 4196 |
| AACCCAATTCACATACACTCTAACCCTCACTAAACA | 4197 |
| AACCCAAATCACATACACTCTCACCCTCACTAAACA | 4198 |
| AACCCAATTCACATACACTCTCACCCTCACTAAAAT | 4199 |
| AACCCAATTCACATACACTCTCTCCCTCACTAAAGA | 4200 |
| AACCCAATTCTCATACACTCTCACCCTCACTAAACA | 4201 |
| ATCCCAATTCACATACACTCTCACCCTCACTAAACA | 4202 |
| AACCCAACTCACATACACTCTCACCCTCACTAAACA | 4203 |
| AACCCAATTCACATACACTCTCACCCTCACTAAAAC | 4204 |
| AACCCAATTCACATACACTCTCACCCTCACTAACTA | 4205 |
| AACCCAATTCACATACACTCTCGCCCTCACTAAAGA | 4206 |
| AACCCAATTCACATTCACTCTCACCCTCACTAAACA | 4207 |
| AACCAAATTCACATACACTCTCACCCTCACTAAACA | 4208 |
| AACCCAATTCACATAAACTCTCACCCTCACTAAAAA | 4209 |
| AACCCAATTCACATACACGCTCACCCTCACAAACA | 4210 |
| AACCCAATTCACATACACTCTCACACTCACTAAACA | 4211 |
| AACCCAATTCACATACACTCTCACCATCACTAAACA | 4212 |
| AACCCAATTCACATACACTCTCACCCTCACTAACGA | 4213 |
| AACCCAATTCACATACACTCTCACCCTCGCTAAACA | 4214 |
| AACCCAATTCACATACACTCTCCCCCTCACTAAAGA | 4215 |
| AACCCAATTCGCATACACTCTCACCCTCACTAAACA | 4216 |
| AACCCAATTCACATACACTCACACCCTCACTAAACA | 4217 |
| AACCCAATTCACATACACTCCCACCCTCACTAAACA | 4218 |
| AACCCAATTCACATACACTCTCACCCTCACTAAACG | 4219 |
| AACCCAATTCACATACTCTCTCACCCTCACTAAAGA | 4220 |
| AACCCAATTCACATACTCTCTCACCCTCACTAAATA | 4221 |
| AACCCAGTTCACATACACTCTCACCCTCACTAAACA | 4222 |
| AAACCAATTCACATACACTCTCACCCTCACTAAACA | 4223 |
| AACACAATTCACATACACTCTCACCCTCACTAAACA | 4224 |
| AACCCAACTCACATACACTCTCACCCTCACTAAAAA | 4225 |
| AACCCAAGTCACATACACTCTCACCCTCACTAAACA | 4226 |
| AACCCAATCCACATACACTCTCACCCTCACTAAAAA | 4227 |
| AACCCAATTAACATACACTCTCACCCTCACTAAACA | 4228 |
| AACCCAATTCACAAACACTCTCACCCTCACTAAACA | 4229 |
| AACCCAATTCACACACACTCTCACCCCCACTAAACA | 4230 |
| AACCCAATTCACACACACTCTCACCCTCACTAAACA | 4231 |
| AACCCAATTCACACACACTCTCCCCCTCACTAAACA | 4232 |
| AACCCAATTCACAGACACTCTCACCCTCACTAAACA | 4233 |
| AACCCAATTCACATACAATCTCACCCTCACTAAACA | 4234 |
| AACCCAATTCACATACACACTCACCCTCACTAAACA | 4235 |
| AACCCAATTCACATACACCCTCACCCTCACTAAAAA | 4236 |
| AACCCAATTCACATACACTATCACCCTCACTAAAAA | 4237 |
| AACCCAATTCACATACACTATCACCCTCACTAAACA | 4238 |
| AACCCAATTCACATACACTCCCACCCTCACTAAAAA | 4239 |
| AACCCAATTCACATACACTCGCACCCTCACTAAACA | 4240 |
| AACCCAATTCACATACACTCTCAACCTCACTAAACA | 4241 |
| AACCCAATTCACATACACTCTCACACTCACTAAAAA | 4242 |
| AACCCAATTCACATACACTCTCACCATCCCTAAACA | 4243 |
| AACCCAATTCACATACACTCTCACCCACACTAAACA | 4244 |
| AACCCAATTCACATACACTCTCACCCGCACTAAACA | 4245 |
| AACCCAATTCACATACACTCTCACCCTAACTAAACA | 4246 |
| AACCCAATTCACATACACTCTCACCCTCAATAAACA | 4247 |
| AACCCAATTCACATACACTCTCACCCTCACCAAACA | 4248 |
| AACCCAATTCACATACACTCTCACCCTCACTAAAAG | 4249 |
| AACCCAATTCACATACACTCTCACCCTCACTAAAGC | 4250 |
| AACCCAATTCACATACACTCTCACCCTCACTAAAGT | 4251 |
| AACCCAATTCACATACACTCTCACCCTCACTAAATC | 4252 |
| AACCCAATTCACATACACTCTCACCCTCACTAAATT | 4253 |
| AACCCAATTCACATACACTCTCACCCTCACTAAGAA | 4254 |
| AACCCAATTCACATACACTCTCACCCTCACTAAGCA | 4255 |
| AACCCAATTCACATACACTCTCACCCTCACTAAGGA | 4256 |
| AACCCAATTCACATACACTCTCACCCTCACTAAGTA | 4257 |
| AACCCAATTCACATACACTCTCACCCTCACTAATAA | 4258 |
| AACCCAATTCACATACACTCTCACCCTCACTAATCA | 4259 |
| AACCCAATTCACATACACTCTCACCCTCACTAATGA | 4260 |
| AACCCAATTCACATACACTCTCACCCTCACTAATTA | 4261 |
| AACCCAATTCACATACACTCTCACCCTCACTACACA | 4262 |
| AACCCAATTCACATACACTCTCACCCTCACTAGACA | 4263 |
| AACCCAATTCACATACACTCTCACCCTCACTATACA | 4264 |
| AACCCAATTCACATACACTCTCACCCTCACTCAACA | 4265 |
| AACCCAATTCACATACACTCTCACCCTCACTGAACA | 4266 |
| AACCCAATTCACATACACTCTCACCCTCACTTAACA | 4267 |
| AACCCAATTCACATACACTCTCACCCTCATTAAACA | 4268 |
| AACCCAATTCACATACACTCTCACCCTCCCTAAAAA | 4269 |
| AACCCAATTCACATACACTCTCACCCTCCCTAAACA | 4270 |
| AACCCAATTCACATACACTCTCACCCTCCCTAAAGA | 4271 |
| AACCCAATTCACATACACTCTCACCCTCCCTAAATA | 4272 |
| AACCCAATTCACATACACTCTCACCCTCGCTAAAAA | 4273 |
| AACCCAATTCACATACACTCTCACCCTCTCTAAAAA | 4274 |
| AACCCAATTCACATACACTCTCACCCTGACTAAACA | 4275 |
| AACCCAATTCACATACACTCTCACCCTTACTAAACA | 4276 |
| AACCCAATTCACATACACTCTCACCTTCACTAAACA | 4277 |
| AACCCAATTCACATACACTCTCACCTTCTCTAAACA | 4278 |
| AACCCAATTCACATACACTCTCACGCTCACTAAACA | 4279 |
| AACCCAATTCACATACACTCTCACTCTCACTAAAAA | 4280 |
| AACCCAATTCACATACACTCTCACTCTCACTAAACA | 4281 |
| AACCCAATTCACATACACTCTCAGCCTCACTAAACA | 4282 |
| AACCCAATTCACATACACTCTCATCCTCACTAAACA | 4283 |
| AACCCAATTCACATACACTCTCCCCCTCACTAAATA | 4284 |
| AACCCAATTCACATACACTCTCGCCCTCACTAAATA | 4285 |
| AACCCAATTCACATACACTCTCTCCCTCACTAAATA | 4286 |
| AACCCAATTCACATACACTGTCACCCTCACTAAACA | 4287 |
| AACCCAATTCACATACACTTTCACCCTCACTAAACA | 4288 |
| AACCCAATTCACATACATTCTCACCCTCACTAAACA | 4289 |
| AACCCAATTCACATACCCTCTCACCCTCACTAAAGA | 4290 |
| AACCCAATTCACATACGCTCTCACCCTCACTAAAAA | 4291 |
| AACCCAATTCACATACGCTCTCACCCTCACTAAAGA | 4292 |
| AACCCAATTCACATATACTCTCACCCTCACTAAAAA | 4293 |
| AACCCAATTCACATATACTCTCACCCTCACTAAACA | 4294 |
| AACCCAATTCACATCCACTCTCACCCTCACTAAACA | 4295 |
| AACCCAATTCACATGCACTCTCACCCTCACTAAACA | 4296 |
| AACCCAATTCACCTACACTCTCACCCTCACTAAAAA | 4297 |
| AACCCAATTCACCTACACTCTCACCCTCACTAAACA | 4298 |
| AACCCAATTCACGTACACTCTCACCCTCACTAAACA | 4299 |
| AACCCAATTCACTTACACTCTCACCCTCACTAAACA | 4300 |
| AACCCAATTCAGATACACTCTCACCCTCACTAAACA | 4301 |
| AACCCAATTCATATACACTCTCACCCTCACTAAAAA | 4302 |
| AACCCAATTCATATACACTCTCACCCTCACTAAACA | 4303 |
| AACCCAATTCCCATACACTCTCACCCTCACTAAACA | 4304 |
| AACCCAATTTACATACACTCTCACCCTCACTAAACA | 4305 |
| AACCCACTTCACATACACTCTCACCCTCACTAAACA | 4306 |
| AACCCATTTCACATACACTCTCACCCTCACTAAACA | 4307 |
| AACCCCATTCACATACACTCTCACCCTCACTAAAAA | 4308 |
| AACCCCATTCACATACACTCTCACCCTCACTAAACA | 4309 |
| AACCCGATTCACATACACTCTCACCCTCACTAAACA | 4310 |
| AACCCTATTCACATACACTCTCACCCTCACTAAAAA | 4311 |
| AACCCTATTCACATACACTCTCACCCTCACTAAACA | 4312 |
| AACCGAATTCACATACACTCTCACCCTCACTAAACA | 4313 |
| AACCTAATTCACATACACTCTCACCCTCACTAAAAA | 4314 |
| AACCTAATTCACATACACTCTCACCCTCACTAAACA | 4315 |
| AACTCAATTCACATACACTCTCACCCTCACTAAACA | 4316 |
| AATCCAATTCACATACACTCTCACCCTCACTAAACA | 4317 |
| ACCCCAATTCACATACACTCTCACCCTCACTAAAAA | 4318 |
| ACCCCAATTCACATACACTCTCACCCTCACTAAACA | 4319 |
| AGCCCAATTCACATACACTCTCACCCTCACTAAAAA | 4320 |
| ATCCCAATTCACATACACTCTCACCCTCACTAAAAA | 4321 |
| CACCCAATTCACATACACTCTCACCCTCACTAAAAA | 4322 |
| CACCCAATTCACATACACTCTCACCCTCACTAAACA | 4323 |
| GACCCAATTCACATACACTCTCACCCTCACTAAACA | 4324 |
| TACCCAATTCACATACACTCTCACCCTCACTAAACA | 4325 |

[1286] Specificity for C1q as a target was performed by immunoprecipitation of C1q depleted or spiked serum and plasma samples. SDS-PAGE analysis of the immunoprecipitation products demonstrated that bands corresponding to C1q subunits (i.e., A, B, C) were only present in the samples spiked with C1q. As a control, oligonucleotides comprising the reverse complements to SEQ ID NOs. 1472 and 1482 were synthesized. For example, the construct comprising the reverse complement to SEQ ID NOs. 1472 comprised the variable region sequence 5′-TTAAGATAGTTGATTTAAAGCGGTGGATTGTTCTATAGT (SEQ ID NO. 4326).

[1287] FIG. 24A shows a silver-stained reducing sodium dodecyl sulfate-polyacrylamide (SDS-PA) gel of immunoprecipitated proteins from plasma samples with the indicated oligonucleotides. In the figure, B1 comprises the variable region SEQ ID NO. 1472, B 11 comprises the variable region SEQ ID NO. 1482, and L4 and L15 comprises variable regions without specific recognition of C1q. The individual biotinylated oligonucleotides were immobilized on streptavidin magnetic beads, contacted with PEG-precipitated plasma isolates from a pool of healthy donors, and the beads were isolated. Proteins that immunoprecipitated with the beads are shown on the gel. Controls included the reverse complements of B1 and B 11 (lanes B1rc and B11rc, respectively) and a control using beads without oligonucleotides (Lane “NO”). Dashed arrows indicate pulled down proteins C1qA, C1qB, and C1qC. The dotted arrow indicates the heavy chain of IgM (IgMHC). The band labeled “SA” is streptavidin and the lane kDa is a protein ladder. As shown in FIG. 24A, specific bands indicated by the dashed arrows were observed in the B1 and B11 immunoprecipitation experiments. These bands were excised and analyzed by LC-MS/MS. This analysis revealed the complement protein complex C1q as the target of sequences B1 and B11, and the figure indicates the positions of C1q subunits A, B and C. In contrast, reverse complement versions of B1 and B11 (i.e., B1rc, B11rc) did not immunoprecipitate C1q. Also shown in the figure, IgM co-precipitated with C1q. Without being bound by theory, these findings are consistent with previous observations where IgM was found to remain complexed with C1q in sera that were precipitated with PEG. See Krieger, et al. Characterization of immune complexes detected by the 125I-C1q binding assay in breast cancer. Clin Immunol Immunopathol 46, 14-23 (1988); which publication is incorporated by reference herein in its entirety.

[1288] To further investigate the interaction of aptamer B1 and B11 with C1q, we performed a filter retention assay. Radioactively labelled B1 and B11 were incubated with increasing concentrations of purified C1q and subsequently passed through a nitrocellulose membrane. The amount of oligonucleotides retained on membrane-immobilized C1q was then quantified by autoradiography. Results are shown in FIG. 24B. These experiments demonstrate that B1 and B11 exhibit concentration dependent binding to C1q, whereas B11rc did not. Similar results were obtained with B11 and B11rc in an Enzyme-Linked Oligonucleotide Assay (ELONA; see U.S. Pat. No. 5,789,163, which patent is incorporated herein in its entirety). See FIG. 24C. The figure shows ELONA analysis of B11 (circles) at indicated concentrations and a fixed C1q concentration (0.625 nM). As a control, the reverse complement of B11, B11RC, was used (squares). “No aptamer” control (triangles) shows low background binding of detector Streptavidin-HRP. B11 specifically binds C1q (estimated K_{D} around 40 nM). This binding behaviour indicates that B1 and B 11 specifically interact with C1q with high affinity.

[1289] A second control comprised the reverse complement to the consensus motif. This construct comprised the variable region sequence 5′-TACTATAGATGGATTGTCCGCTTTAAATCAACTATCTTA (SEQ ID NO. 4327) and did not immunoprecipitate C1q from plasma.

[1290] Table 45 lists proteins that were identified in the immunoprecipitation with B1 (i.e., SEQ ID NO. 1472) using PSMs (peptide spectrum matches) sorted by area. The proteins in the list were observed only in the immunoprecipitation with Bi (i.e., not observed with negative controls) or at levels at least 2-fold over negative controls. The mass spectrometry results were obtained from a single band that was run a short distance in a gel in order to clean up the sample. Accession numbers in the table are from the UniProt database (www.uniprot.org). “GN=” is followed by the gene name. As seen in Table 45, C1q subunits A-C were prominent in the results. IgM was also observed at high levels. Without being bound by theory, this may be due to complexes between C1q and immunoglobulins as noted above. Complement C4b-binding protein alpha chain was also observed at 10-fold higher levels versus controls.

TABLE 45
Oligonucleotide probe targets

| Accession | |
|---|---|
| number | Protein name |
| P02747 | Complement C1q subcomponent subunit C GN = C1QC |
| P02746 | Complement C1q subcomponent subunit B GN = C1QB |
| P01871 | Ig mu chain C region GN = IGHM |
| P04220 | Ig mu heavy chain disease protein |
| P02745 | Complement C1q subcomponent subunit A GN = C1QA |
| P01834 | Ig kappa chain C region GN = IGKC |
| P0CG05 | Ig lambda-2 chain C regions GN = IGLC2 |
| B9A064 | Immunoglobulin lambda-like polypeptide 5 GN = IGLL5 |
| P01857 | Ig gamma-1 chain C region GN = IGHG1 |
| P01860 | Ig gamma-3 chain C region GN = IGHG3 |
| P01859 | Ig gamma-2 chain C region GN = IGHG2 |
| P01766 | Ig heavy chain V-III region BRO |
| O43866 | CD5 antigen-like GN = CD5L |
| P01877 | Ig alpha-2 chain C region GN = IGHA2 |
| P01617 | Ig kappa chain V-II region TEW |
| P01767 | Ig heavy chain V-III region BUT |
| P06310 | Ig kappa chain V-II region RPMI 6410 |
| P01768 | Ig heavy chain V-III region CAM |
| P01779 | Ig heavy chain V-III region TUR |
| P01620 | Ig kappa chain V-III region SIE |
| P01606 | Ig kappa chain V-I region OU |
| P04208 | Ig lambda chain V-I region WAH |
| P18135 | Ig kappa chain V-III region HAH |
| P01825 | Ig heavy chain V-II region NEWM |
| P01591 | Immunoglobulin J chain GN = IGJ |
| P01598 | Ig kappa chain V-I region EU |
| P01605 | Ig kappa chain V-I region Lay |
| P04433 | Ig kappa chain V-III region VG (Fragment) |
| P01610 | Ig kappa chain V-I region WEA |
| Q8WZ74 | Cortactin-binding protein 2 GN = CTTNBP2 |
| P01781 | Ig heavy chain V-III region GAL |
| P04003 | C4b-binding protein alpha chain GN = C4BPA |
| P00739 | Haptoglobin-related protein GN = HPR |
| P06312 | Ig kappa chain V-IV region (Fragment) GN = IGKV4-1 |
| P00738-2 | Isoform 2 of Haptoglobin GN = HP |
| P01625 | Ig kappa chain V-IV region Len |
| P01717 | Ig lambda chain V-IV region Hil |
| Q04695 | Keratin, type I cytoskeletal 17 GN = KRT17 |
| Q96PE2 | Rho guanine nucleotide exchange factor 17 GN = ARHGEF17 |
| P04211 | Ig lambda chain V region 4A |
| P05090 | Apolipoprotein D GN = APOD |
| P34096 | Ribonuclease 4 GN = RNASE4 |
| P01714 | Ig lambda chain V-III region SH |
| 014490-3 | Isoform 3 of Disks large-associated protein 1 GN = DLGAP1 |
| P04196 | Histidine-rich glycoprotein GN = HRG |
| P35030-5 | Isoform 5 of Trypsin-3 GN = PRSS3 |
| P04430 | Ig kappa chain V-I region BAN |
| P00748 | Coagulation factor XII GN = F12 |
| P06727 | Apolipoprotein A-IV GN = APOA4 |
| P02655 | Apolipoprotein C-II GN = APOC2 |
| P01611 | Ig kappa chain V-I region Wes |
| Q569G3 | Uncharacterized protein C5orf47 GN = C5orf47 |
| Q9Y490 | Talin-1 GN = TLN1 |
| Q5D862 | Filaggrin-2 GN = FLG2 |
| P01876 | Ig alpha-1 chain C region GN = IGHA1 |
| P01703 | Ig lambda chain V-I region NEWM |
| P02768 | Serum albumin GN = ALB |
| P10909-3 | Isoform 3 of Clusterin GN = CLU |
| P60709 | Actin, cytoplasmic 1 GN = ACTB |
| P04114 | Apolipoprotein B-100 GN = APOB |
| P0C0L4-2 | Isoform 2 of Complement C4-A GN = C4A |
| P0C0L5 | Complement C4-B GN = C4B |
| Q9H4B7 | Tubulin beta-1 chain GN = TUBB1 |
| P02675 | Fibrinogen beta chain GN = FGB |
| P01024 | Complement C3 GN = C3 |
| P35579 | Myosin-9 GN = MYH9 |
| P21333-2 | Isoform 2 of Filamin-A GN = FLNA |
| P02679-2 | Isoform Gamma-A of Fibrinogen gamma chain GN = FGG |
| P00698 | Lysozyme C OS = Gallus gallus GN = LYZ |
| P02671 | Fibrinogen alpha chain GN = FGA |
| P02647 | Apolipoprotein A-I GN = APOA1 |
| P68363-2 | Isoform 2 of Tubulin alpha-1B chain GN = TUBA1B |
| Q14624 | Inter-alpha-trypsin inhibitor heavy chain H4 GN = ITIH4 |
| P00747 | Plasminogen GN = PLG |
| P02649 | Apolipoprotein E GN = APOE |
| Q9Y2P0 | Zinc finger protein 835 GN = ZNF835 |
| Q96IY4 | Carboxypeptidase B2 GN = CPB2 |
| P08519 | Apolipoprotein(a) GN = LPA |
| P04264 | Keratin, type II cytoskeletal 1 GN = KRT1 |
| P35908 | Keratin, type II cytoskeletal 2 epidermal GN = KRT2 |
| P02751-10 | Isoform 10 of Fibronectin GN = FN1 |
| P01023 | Alpha-2-macro globulin GN = A2M |
| P01009-2 | Isoform 2 of Alpha-1-antitrypsin GN = SERPINA1 |
| P05160 | Coagulation factor XIII B chain GN = F13B |
| P04004 | Vitronectin GN = VTN |
| Q86YZ3 | Hornerin GN = HRNR |
| P13645 | Keratin, type I cytoskeletal 10 GN = KRT10 |
| P13647 | Keratin, type II cytoskeletal 5 GN = KRT5 |
| Q03591 | Complement factor H-related protein 1 GN = CFHR1 |
| P08603 | Complement factor H GN = CFH |
| P35527 | Keratin, type I cytoskeletal 9 GN = KRT9 |
| P00488 | Coagulation factor XIII A chain GN = F13A1 |

[1291] The oligonucleotide sequences in Table 44 can be further modified to assess the effects of various subsequences and structural conformation on the ability to bind C1q. Exemplary rationally designed modifications are shown in Table 46. For example, the modifications can be based on the secondary structure of the oligonucleotides as estimated using inFold. The sequences in the table may comprise a modification such as a 5′ Biotin motif. The Name column indicates the sequence and/or modifications thereof. For example, “83s Bi Full” (SEQ ID NO. 4328) consists of the 83s B1 sequence (SEQ ID NO. 1472) shown above with 5′ and 3′ regions (i.e., SEQ ID NOs. 131 and 132, respectively). Beneath are truncations (“TrXX-YY,” where XX is the start position of the truncation and YY is the end position of the truncation as compared to the parent), substitutions (e.g., T(23)G indicating that T at position 23 of the parent sequence is modified to G), and combinations thereof. “RC” indicates reverse complement sequence, in this case for use as a negative control. The italicized and underlined sequences highlight the 5′-ACAATCC consensus sequence.

TABLE 46
Modified anti-C1q oligonucleotide probe targets

| Name | Sequence | SEQ ID NO. |
|---|---|---|
| 83s B1 Full | CTAGCATGACTGCAGTACGTACTATAGAACAATCCACCGCTTTAAATCA | 4328 |
| | ACTATCTTACTGTCTCTTATACACATCTGACGCTGCCGACGA | |
| 83s B1_Tr17- | ACGTACTATAGAACAATCCACCGCTTTAAATCAACTATCTTACTGT | 4329 |
| 62 | | |
| 83s B1_Tr19- | GTACTATAGAACAATCCACCGCTTTAAATCAACTATCTTAC | 4330 |
| 59 | | |
| 83s | CTAGCATGACTGCAGTACGTACGATAGAACAATCCACCGCTTTAAATCA | 4331 |
| B1_T(23)G | ACTATCTTACTGTCTCTTATACACATCTGACGCTGCCGACGA | |
| 83s B1_Tr17- | ACGTACGATAGAACAATCCACCGCTTTAAATCAACTATCTTACTGT | 4332 |
| 62T(23)G | | |
| 83s | CTAGCATGACTGCAGTACGTACTATAGAACAATCCACCGCTTTAAATCA | 4333 |
| B1_T(57)G | ACTATCTGACTGTCTCTTATACACATCTGACGCTGCCGACGA | |
| 83s | ATAGAACAATCCACCGCTTTAAATCAACTATCTGACTGTCTCTTATACA | 4334 |
| B1_T(57)G_T | CATC | |
| r24-76 | | |
| 83S-B11 Full | CTAGCATGACTGCAGTACGTAACCCAATTCACATACACTCTCACCCCCA | 4335 |
| | CTAAACACTGTCTCTTATACACATCTGACGCTGCCGACGA | |
| B11_C(47)T | CTAGCATGACTGCAGTACGTAACCCAATTCACATACACTCTCACCCTCA | 4336 |
| | CTAAACACTGTCTCTTATACACATCTGACGCTGCCGACGA | |
| B11_Tr19-35 | GTAACCCAATTCACATAC | 4337 |
| B11 | GGTAACCCAATTCACATACC | 4338 |
| Tr_G18_19- | | |
| 35_36C | | |
| 83s B1RC | CTAGCATGACTGCAGTACGTTAAGATAGTTGATTTAAAGCGGTGGATTG | 4339 |
| (Negative | TTCTATAGTCTGTCTCTTATACACATCTGACGCTGCCGACGA | |
| Control) | | |
| 83S-B4 Full | CTAGCATGACTGCAGTACGTTACCCCTGACAATCCTCGCGCCGAGGCCT | 4340 |
| | CCATCCTGACTGTCTCTTATACACATCTGACGCTGCCGACGA | |
| 83s-B14 Full | CTAGCATGACTGCAGTACGTTACCCCTGACAATCCTCGCGCCGAGGCCT | 4341 |
| | CCATCCTCACTGTCTCTTATACACATCTGACGCTGCCGACGA | |
| 83s-B6 Full | CTAGCATGACTGCAGTACGTGATTTTAAAACCCTTGCACCTGATTGTGC | 4342 |
| | CAATCCACTGTCTCTTATACACATCTGACGCTGCCGACGA | |

[1292] In further analysis, C1q was immunoprecipitated from female plasma samples using the 83s B1 aptamer (or its negative control). For sequences, see Table 46 above. C1q was eluted with TFA/Urea+/−acetonitrile then detected by either an in-solution trypsin digestion followed by mass spectrometry or SDS-PAGE stained for total protein as in FIG. 24A (gel not shown). Mass Spectrometry was performed using the Q Exactive HF Mass Spectrometer system from ThermoFisher Scientific (Waltham, MA) according to the manufacturer's instructions. Various post-translational modifications (PTM) have been observed for C1q A. For example, the UniProt database lists various oxidation sites (e.g., P45, K48, P54, P57, P73, P79, P85) and galactosyl sites (e.g., K48, K67). Other modifications were reported in Pflieger et al., Analysis of Human C1q by Combined Bottom-up and Top-down Mass Spectrometry, Mol Cell Proteomics. 2010 April; 9(4): 593-610, which publication is incorporated by reference herein in its entirety. Table 47 lists PTMs observed in this study. The modifications in bold italics are previously unreported to our knowledge.

TABLE 47
Observed C1q A post-translational modifications

| Position | Target | Modification | Classification | Sequence Motif | SEQ ID NO. |
|---|---|---|---|---|---|
| 45 | P | Oxidation | Post-translational | PGRRGRpGLKGEQ | 4343 |
| 48 | K | Galactosyl | O-linked glycosylation | RGRPGLkGEQGEP | 4344 |
| 48 | K | Oxidation | Post-translational | RGRPGLkGEQGEP | 4345 |
| 54 | P | Oxidation | Post-translational | KGEQGEpGAPGIR | 4346 |
| 57 | P | Oxidation | Post-translational | QGEPGApGIRTGI | 4346 |
| 67 | K | Galactosyl | O-linked glycosylation | TGIQGLkGDQGEP | 4347 |
| 73 | P | Oxidation | Post-translational | KGDQGEpGPSGNP | 4348 |
| 75 | P | Oxidation | Post-translational | DQGEPGpSGNPGK | 4349 |
| 79 | P | Oxidation | Post-translational | PGPSGNpGKVGYP | 4350 |
| 81 | K | Galactosyl | O-linked glycosylation | PSGNPGkVGYPGP | 4351 |
| 85 | P | Oxidation | Post-translational | PGKVGYpGPSGPL | 4352 |
| 87 | P | Oxidation | Post-translational | KVGYPGpSGPLGA | 4353 |
| 106 | P | Oxidation | Post-translational | KGTKGSpGNIKDQ | 4354 |
| 126 | M | Oxidation | Artefact | IRRNPPmGGNVVI | 4355 |
| 205 | M | Oxidation | Artefact | QVVSGGmVLQLQQ | 4356 |

### Example 36: C1q Immunoassay and Isolation

[1293] This Example illustrates C1q immunoassays using an anti-C1q oligonucleotide. A nucleic acid construct is synthesized comprising an anti-C1q oligonucleotide region, for example, as described in Example 35 above. The anti-C1q construct comprises a 5′ biotin modification to facilitate specific recognition by a desired moiety attached to streptavidin.

[1294] A labeled anti-C1q aptamer construct is constructed. The anti-C1q construct is contacted with fluorescently labeled streptavidin such as a streptavidin—Alexa Fluor® 488 conjugate from Thermo Fisher Scientific, Catalog number: S11223. This creates a fluorescently labeled anti-C1q construct which is used to detect C1q in various immunoassay formats. In one scenario, a biological sample known or suspected to contain C1q is contacted with an ELISA plate. The plate is washed and contacted with the fluorescently labeled anti-C1q construct. The fluorescent signal is read from the wells in the plate, thereby providing an indication of the presence or amount of C1q in the biological sample. In another scenario, a biological sample is directly contacted with the fluorescently labeled anti-C1q construct. The contacted sample is subjected to flow cytometry to detect fluorescent particles of the size of microvesicles, thereby providing an indication of the presence or amount of microvesicle associated C1q in the biological sample. Alternate labels such as disclosed herein or known in the art can be used in such formats.

[1295] Various modifications of the above scenarios are performed. For example, the anti-C1q aptamer is directly labeled with Alexa Fluor during the oligonucleotide synthesis process.

[1296] An immobilized anti-C1q aptamer is constructed. In one scenario, the anti-C1q aptamer construct is contacted with streptavidin conjugated beads. The beads are contacted with a biological sample known or suspected to contain C1q. The beads are precipitated (e.g., by centrifugation or magnetism) and washed. Proteins that precipitate with the beads are analyzed, thereby providing an indication of the presence or amount of C1q and associated proteins in the biological sample. In another scenario, the anti-C1q aptamer construct is contacted with streptavidin agarose resin, e.g., Pierce™ Streptavidin Agarose, Thermo Fisher Scientific Catalog number: 20347 or Pierce™ High Capacity Streptavidin Agarose Thermo Fisher Scientific Catalog number: 20357. The resins are placed in a spin column or chromatography column, respectively. The anti-C1q aptamer is contacted with the resin where it is bound by the streptavidin. A biological sample known or suspected to comprise C1q is allowed to pass through the resin. C1q and associated proteins in the biological sample are retained by the anti-C1q aptamer within the resin and are then analyzed after elution. In either scenario, if desired, the anti-C1q aptamer is contacted with the biological sample in solution and then the sample is contacted with the beads or resin. C1q and associated proteins are analyzed as above. This modification allows the C1q and aptamer to bind freely in solution prior to aptamer immobilization.

[1297] Various modifications of the above scenarios are performed. For example, the anti-C1q aptamer is directly conjugated to a bead or other desired surface.

[1298] One of skill will appreciate that the anti-C1q aptamer construct can be used in any desired scenario where antibodies are conventionally used. See, e.g., Toh et al., Aptamers as a replacement for antibodies in enzyme-linked immunosorbent assay. Biosens Bioelectron. 2015 Feb. 15; 64:392-403. doi: 10.1016/j.bios.2014.09.026. Epub 2014 Sep. 16; Chen and Yang, Replacing antibodies with aptamers in lateral flow immunoassay. Biosens Bioelectron. 2015 Sep. 15; 71:230-42. doi: 10.1016/j.bios.2015.04.041. Epub 2015 Apr. 14; Guthrie et al, Assays for cytokines using aptamers. Methods. 2006 April; 38(4):324-30; Romig et al., Aptamer affinity chromatography: combinatorial chemistry applied to protein purification. J Chromatogr B Biomed Sci Appl. 1999 Aug. 20; 731(2):275-84.

### Example 37: C1q Detection in Bodily Fluids

[1299] This Example describes using an anti-C1q oligonucleotide to detect C1q in bodily fluids. A bodily fluid such as blood or a derivative thereof, including without limitation sera or plasma, is obtained from a subject. An assay such as described in Example 36 is used to detect C1q in the bodily fluid. As desired, such detection may assist in the diagnosis, prognosis or theranosis of a disease or disorder. See, e.g., Examples 13-14 herein.

[1300] In one scenario, the anti-C1q aptamer is used to capture and quantitate immune complexes in clinical samples based on the ability of C1q to preferentially bind immune complexes versus monomeric immunoglobulins.

### Example 38: C1q Inhibition

[1301] This Example describes using an anti-C1q oligonucleotide to inhibit C1q mediated apoptosis.

[1302] Deficiency in the host C1q inhibitor protein, encoded by the SERPING1 gene (also known as C1NH and others), is associated with hereditary angioedema (“hereditary angioneurotic edema”; “HAE”), which comprises swelling due to leakage of fluid from blood vessels into connective tissue. In addition to facial swelling and/or abdominal pain, C1q inhibitor deficiency also predisposes to autoimmune diseases, e.g., lupus erythematosus, and age related macular degeneration. C1q inhibitors CINRYZE® (C1 esterase inhibitor [human]) and RUCONEST® (C1 esterase inhibitor [recombinant]) are approved by the US FDA for HAE symptoms. See, e.g., Bernstein, Hereditary angioedema: a current state-of-the-art review, VIII: current status of emerging therapies. Ann. Allergy Asthma Immunol. 100 (1 Suppl 2): S41-6 (January 2008). A pharmaceutical composition comprising an anti-C1q oligonucleotide of the invention is administered to an HAE patient in sufficient dosage to ameliorate symptoms of HAE.

[1303] As the complement cascade damages cells, C1q inhibitors have potential functionality for diseases other than HAE. See e.g., Caliezi et al, C1-Esterase inhibitor: an anti-inflammatory agent and its potential use in the treatment of diseases other than hereditary angioedema. Pharmacol. Rev. 52 (1): 91-112 (March 2000). During heart attack, lack of oxygen in heart cells causes necrosis in heart cells. Dying heart cells spill their contents in the extracellular environment, which triggers the complement cascade and may increase the damage for the surviving heart cells. A pharmaceutical composition comprising an anti-C1q oligonucleotide of the invention is administered to a heart attack victim in sufficient dosage to ameliorate complement-mediated heart damage. Similarly, a pharmaceutical composition comprising an anti-C1q oligonucleotide of the invention is administered to a patient following organ transplantation to ameliorate delayed graft function.

[1304] The complement cascade is a first defense against non-self cells and is also activated by malignant cells. Thus, complement appears to play a role in cancer surveillance by the immune system. Recently, however, it has been reported that the complement system can also play a role in promoting tumor growth, inflammation and angiogenesis. Thus, complement inhibition has been proposed for cancer treatment. See, e.g., Pio et al, Complement inhibition: a promising concept for cancer treatment, Semin Immunol. 2013 February; 25(1): 54-64; Pio et al., The role of complement in tumor growth. Adv Exp Med Biol. 2014; 772:229-62. It has further been reported that C1q may act in the tumor microenvironment to promote cancer independently of its complement function. Bulla et al. report that C1q may promote cancer cell adhesion, migration and proliferation as well as angiogenesis and metastasis. See Bulla et al., C1q acts in the tumour microenvironment as a cancer-promoting factor independently of complement activation. Nat Commun. 2016; 7: 10346. A pharmaceutical composition comprising an anti-C1q oligonucleotide of the invention is administered to a cancer victim in sufficient dosage to treat the cancer in the victim. As desired, the composition is administered in combination with traditional cancer therapeutics or in addition to immune therapies, e.g., cell-based tumor immunotherapies, or antitumor vaccines.

### Example 39: Complement Cascade Initiation

[1305] This Example describes using an anti-C1q oligonucleotide to direct complement mediated cell killing.

[1306] Antibody immunotherapies may direct the killing of target cells through several mechanisms, including without limitation complement-dependent cytotoxicity (CDC), antibody-dependent cellular cytotoxicity (ADCC), apoptosis, and direct growth arrest. See, e.g., Taylor and Lindorfer, The role of complement in mAb-based therapies of cancer. Methods. 2014 Jan. 1; 65(1):18-27. doi: 10.1016/j.ymeth.2013.07.027. Epub 2013 Jul. 22; Rogers et al., Complement in monoclonal antibody therapy of cancer. Immunol Res. 2014 August; 59(1-3):203-10. doi: 10.1007/s12026-014-8542-z; Zhou et al., The Role of Complement in the Mechanism of Action of Rituximab for B-Cell Lymphoma: Implications for Therapy, The Oncologist September 2008 vol. 13 no. 9 954-966; Di Gaetano et al., Complement activation determines the therapeutic activity of rituximab in vivo. J Immunol. 2003 Aug. 1; 171(3):1581-7.

[1307] The Fc regions of membrane-bound therapeutic antibodies interact with the heterooligomeric C1q complex and activate the classical complement pathway to initiate CDC. A multipartite construct comprising an anti-C1q oligonucleotide of the invention is provided in a pharmaceutical composition. The pharmaceutical composition is administered to a cancer victim in sufficient dosage to treat the cancer in the victim. The construct comprises the anti-C1q oligonucleotide connected to an anti-tumor domain. See, e.g., FIGS. 23A-D herein and related discussion. The anti-tumor domain can be to a general tumor antigen or specific to a tumor of a given origin. See, e.g., Section “Anti-target and multivalent oligonucleotides” herein for illustrative targets. As desired, the multipartite construct comprising an anti-C1q oligonucleotide is used to direct complement mediated cell killing where cancer cells and tumors have adapted to evade the complement system.

[1308] As noted herein, C1q may play a role in both preventing cancer, e.g., through complement mediated cell killing, and facilitating the growth of cancer, e.g., through cancer cell adhesion, migration and proliferation as well as angiogenesis and metastasis, perhaps in a non-complement fashion. Such disparate roles allow for combination treatment with oligonucleotides of the invention that both inhibit the roles of C1q in promoting cancer while targeting C1q mediated cell killing to cancer cells. A multipartite construct comprising an anti-C1q oligonucleotide of the invention is provided in a pharmaceutical composition. An anti-C1q oligonucleotide of the invention that inhibits non-complement functions of C1q is provided in a pharmaceutical composition. The pharmaceutical compositions are administered to a cancer victim in sufficient dosage to treat the cancer in the victim.

[1309] Although preferred embodiments of the present invention have been shown and described herein, it will be obvious to those skilled in the art that such embodiments are provided by way of example only. Numerous variations, changes, and substitutions will now occur to those skilled in the art without departing from the invention. It should be understood that various alternatives to the embodiments of the invention described herein may be employed in practicing the invention. It is intended that the following claims define the scope of the invention and that methods and structures within the scope of these claims and their equivalents be covered thereby.

The application's sequence listing, which the Patent Office published only in electronic form, follows.

SEQUENCE LISTING (4459 sequences)

SEQ ID NO: 1 - DNA, 32 bp, synthetic construct
  misc_feature 1..32: note = Synthetic oligonucleotide
  source 1..32: mol_type = other DNA
ccccccgaatcacatgacttgggcgggggtcg

SEQ ID NO: 2 - DNA, 32 bp, synthetic construct
  misc_feature 1..32: note = Synthetic oligonucleotide
  source 1..32: mol_type = other DNA
accggatagcggttggaggcgtgctccactcg

SEQ ID NO: 3 - DNA, 32 bp, synthetic construct
  misc_feature 1..32: note = Synthetic oligonucleotide
  source 1..32: mol_type = other DNA
ccgcgcagatatacaacgtacctctgtgcgca

SEQ ID NO: 4 - DNA, 70 bp, synthetic construct
  misc_feature 1..70: note = Synthetic oligonucleotide
  source 1..70: mol_type = other DNA
atccagagtgacgcagcagtcttttctgatggacacgtggtggtctagtatctggacacggtggcttagt

SEQ ID NO: 5 - RNA, 70 nt, synthetic construct
  misc_feature 1..70: note = Synthetic oligonucleotide
  source 1..70: mol_type = other RNA
atccagagtgacgcagcagtcttttctgatggacacgtggtggtctagtatcactaagccaccgtgtcca

SEQ ID NO: 6 - DNA, 32 bp, synthetic construct
  misc_feature 1..32: note = Synthetic oligonucleotide
  source 1..32: mol_type = other DNA
ctgtgaggcgtactgcggtgagcctctcatta

SEQ ID NO: 7 - DNA, 26 bp, synthetic construct
  misc_feature 1..26: note = Synthetic oligonucleotide
  source 1..26: mol_type = other DNA
  modified_base 1: mod_base = OTHER; note = Biotin modified nucleotide
caattgggcccgtccgtatggtgggt

SEQ ID NO: 8 - RNA, 80 nt, synthetic construct
  misc_feature 1..80: note = Synthetic oligonucleotide
  misc_difference 16..55: note = misc_feature - n is a, c, g, or u
  source 1..80: mol_type = other RNA
gggaggacgatgcggnnnnnnnnnnnnnnnnnnnnnnnnnnnnnnnnnnnnnnnncagacgactcgctgaggatccgaga

SEQ ID NO: 9 - RNA, 15 nt, synthetic construct
  misc_feature 1..15: note = Synthetic oligonucleotide
  source 1..15: mol_type = other RNA
gggaggacgatgcgg

SEQ ID NO: 10 - RNA, 25 nt, synthetic construct
  misc_feature 1..25: note = Synthetic oligonucleotide
  source 1..25: mol_type = other RNA
cagacgactcgctgaggatccgaga

SEQ ID NO: 11 - RNA, 40 nt, synthetic construct
  misc_feature 1..40: note = Synthetic oligonucleotide
  source 1..40: mol_type = other RNA
cgcgtcttccccgcattgccgcaattgccatacattaata

SEQ ID NO: 12 - DNA, 40 bp, synthetic construct
  misc_feature 1..40: note = Synthetic oligonucleotide
  source 1..40: mol_type = other DNA
cgcgtcttccccgcattgccgcaattgccatacattaata

SEQ ID NO: 13 - RNA, 40 nt, synthetic construct
  misc_feature 1..40: note = Synthetic oligonucleotide
  source 1..40: mol_type = other RNA
gtccggaacgcctcgatcctcgcataatatgatacgtctg

SEQ ID NO: 14 - DNA, 40 bp, synthetic construct
  misc_feature 1..40: note = Synthetic oligonucleotide
  source 1..40: mol_type = other DNA
gtccggaacgcctcgatcctcgcataatatgatacgtctg

SEQ ID NO: 15 - RNA, 40 nt, synthetic construct
  misc_feature 1..40: note = Synthetic oligonucleotide
  source 1..40: mol_type = other RNA
gtccatggtacgcctcgattccgcccatacatgcatgtaa

SEQ ID NO: 16 - DNA, 40 bp, synthetic construct
  misc_feature 1..40: note = Synthetic oligonucleotide
  source 1..40: mol_type = other DNA
gtccatggtacgcctcgattccgcccatacatgcatgtaa

SEQ ID NO: 17 - RNA, 40 nt, synthetic construct
  misc_feature 1..40: note = Synthetic oligonucleotide
  source 1..40: mol_type = other RNA
cactatccgtttgtccgtcctcttgtggtattgcgcatgc

SEQ ID NO: 18 - DNA, 40 bp, synthetic construct
  misc_feature 1..40: note = Synthetic oligonucleotide
  source 1..40: mol_type = other DNA
cactatccgtttgtccgtcctcttgtggtattgcgcatgc

SEQ ID NO: 19 - RNA, 40 nt, synthetic construct
  misc_feature 1..40: note = Synthetic oligonucleotide
  source 1..40: mol_type = other RNA
tcttccatctggtcgcgatacagaatacgattaacataaa

SEQ ID NO: 20 - DNA, 40 bp, synthetic construct
  misc_feature 1..40: note = Synthetic oligonucleotide
  source 1..40: mol_type = other DNA
tcttccatctggtcgcgatacagaatacgattaacataaa

SEQ ID NO: 21 - RNA, 40 nt, synthetic construct
  misc_feature 1..40: note = Synthetic oligonucleotide
  source 1..40: mol_type = other RNA
gatcacgctgccctttgtttaaggcctttatacaaacgca

SEQ ID NO: 22 - DNA, 40 bp, synthetic construct
  misc_feature 1..40: note = Synthetic oligonucleotide
  source 1..40: mol_type = other DNA
gatcacgctgccctttgtttaaggcctttatacaaacgca

SEQ ID NO: 23 - RNA, 40 nt, synthetic construct
  misc_feature 1..40: note = Synthetic oligonucleotide
  source 1..40: mol_type = other RNA
tattcgccagtcacatcaactatgatgacgcttgactgga

SEQ ID NO: 24 - DNA, 40 bp, synthetic construct
  misc_feature 1..40: note = Synthetic oligonucleotide
  source 1..40: mol_type = other DNA
tattcgccagtcacatcaactatgatgacgcttgactgga

SEQ ID NO: 25 - RNA, 40 nt, synthetic construct
  misc_feature 1..40: note = Synthetic oligonucleotide
  source 1..40: mol_type = other RNA
taccgcctcatcatcggacacgacgtgtatcagttggctg

SEQ ID NO: 26 - RNA, 40 nt, synthetic construct
  misc_feature 1..40: note = Synthetic oligonucleotide
  source 1..40: mol_type = other RNA
gttctcgcctctgtcctcatggttcgaaccggtatgcatg

SEQ ID NO: 27 - RNA, 40 nt, synthetic construct
  misc_feature 1..40: note = Synthetic oligonucleotide
  source 1..40: mol_type = other RNA
gcggtttcttctcctgactacatgagattaataaacgcgc

SEQ ID NO: 28 - RNA, 40 nt, synthetic construct
  misc_feature 1..40: note = Synthetic oligonucleotide
  source 1..40: mol_type = other RNA
ccgcctcgaacactgacgtcgtggaaccttcgattgctag

SEQ ID NO: 29 - RNA, 40 nt, synthetic construct
  misc_feature 1..40: note = Synthetic oligonucleotide
  source 1..40: mol_type = other RNA
aatcacagtaattctgcccctctgatgaaaccggttactt

SEQ ID NO: 30 - RNA, 40 nt, synthetic construct
  misc_feature 1..40: note = Synthetic oligonucleotide
  source 1..40: mol_type = other RNA
cttagtgatttcgccgcccctctgtttagtggccattgga

SEQ ID NO: 31 - RNA, 40 nt, synthetic construct
  misc_feature 1..40: note = Synthetic oligonucleotide
  source 1..40: mol_type = other RNA
acactattccggtaagtcatcgtttaaccgtttgttgcaa

SEQ ID NO: 32 - RNA, 40 nt, synthetic construct
  misc_feature 1..40: note = Synthetic oligonucleotide
  source 1..40: mol_type = other RNA
tgcgcaacgccttgattcactcctacagtgtgtctataga

SEQ ID NO: 33 - RNA, 40 nt, synthetic construct
  misc_feature 1..40: note = Synthetic oligonucleotide
  source 1..40: mol_type = other RNA
aatgttaagcttacatacgcctgggtcactctttgttctg

SEQ ID NO: 34 - RNA, 40 nt, synthetic construct
  misc_feature 1..40: note = Synthetic oligonucleotide
  source 1..40: mol_type = other RNA
gtaaatattcacgttgaatcgccttgctcctcttagtctg

SEQ ID NO: 35 - RNA, 40 nt, synthetic construct
  misc_feature 1..40: note = Synthetic oligonucleotide
  source 1..40: mol_type = other RNA
ccgcctcggatcgttcccaatggtggtacccctattaatg

SEQ ID NO: 36 - RNA, 40 nt, synthetic construct
  misc_feature 1..40: note = Synthetic oligonucleotide
  source 1..40: mol_type = other RNA
tgtagatcgttcttatccgcctcggtcttccccaggttaa

SEQ ID NO: 37 - RNA, 40 nt, synthetic construct
  misc_feature 1..40: note = Synthetic oligonucleotide
  source 1..40: mol_type = other RNA
atcgtcgggccccttttatgaaacttacatgaaagcgcac

SEQ ID NO: 38 - RNA, 40 nt, synthetic construct
  misc_feature 1..40: note = Synthetic oligonucleotide
  source 1..40: mol_type = other RNA
taagagtgcacagtactgcctcgatcctccatggcttaag

SEQ ID NO: 39 - RNA, 40 nt, synthetic construct
  misc_feature 1..40: note = Synthetic oligonucleotide
  source 1..40: mol_type = other RNA
gaattagtactgacggccgccttgatcctccgttagtctg

SEQ ID NO: 40 - RNA, 40 nt, synthetic construct
  misc_feature 1..40: note = Synthetic oligonucleotide
  source 1..40: mol_type = other RNA
gcccgcctccgaagccctcctaagtgcactttaaaccgcg

SEQ ID NO: 41 - RNA, 40 nt, synthetic construct
  misc_feature 1..40: note = Synthetic oligonucleotide
  source 1..40: mol_type = other RNA
ccgcctgggatcactctctacgcgtataaatgctctgtca

SEQ ID NO: 42 - RNA, 40 nt, synthetic construct
  misc_feature 1..40: note = Synthetic oligonucleotide
  source 1..40: mol_type = other RNA
agtctgaccctgttatggactaccatatcagaaaggtact

SEQ ID NO: 43 - RNA, 40 nt, synthetic construct
  misc_feature 1..40: note = Synthetic oligonucleotide
  source 1..40: mol_type = other RNA
ggtgatcctcccccccgcctcgaagatttgtgcacatatc

SEQ ID NO: 44 - RNA, 40 nt, synthetic construct
  misc_feature 1..40: note = Synthetic oligonucleotide
  source 1..40: mol_type = other RNA
gctaccatcgtctagtgagtcacccttagttcatcaaggc

SEQ ID NO: 45 - DNA, 18 bp, synthetic construct
  misc_feature 1..18: note = Synthetic oligonucleotide
  source 1..18: mol_type = other DNA
gctgtgtgactcctgcaa

SEQ ID NO: 46 - DNA, 19 bp, synthetic construct
  misc_feature 1..19: note = Synthetic oligonucleotide
  source 1..19: mol_type = other DNA
gcagctgtatcttgtctcc

SEQ ID NO: 47 - DNA, 43 bp, synthetic construct
  misc_feature 1..43: note = Synthetic oligonucleotide
  source 1..43: mol_type = other DNA
gtccgcttgggggtgggtatcgaaaattcgcgttctggggcgg

SEQ ID NO: 48 - DNA, 43 bp, synthetic construct
  misc_feature 1..43: note = Synthetic oligonucleotide
  source 1..43: mol_type = other DNA
cttcgctcgtttcaatgttcagttctggtctttaggtctttag

SEQ ID NO: 49 - DNA, 43 bp, synthetic construct
  misc_feature 1..43: note = Synthetic oligonucleotide
  source 1..43: mol_type = other DNA
taggaggataatatgtatccggtgcatcggcctgactttcccc

SEQ ID NO: 50 - DNA, 43 bp, synthetic construct
  misc_feature 1..43: note = Synthetic oligonucleotide
  source 1..43: mol_type = other DNA
taggagggctgaaaacttgcttcttcccggtgcagttataaca

SEQ ID NO: 51 - DNA, 43 bp, synthetic construct
  misc_feature 1..43: note = Synthetic oligonucleotide
  source 1..43: mol_type = other DNA
taggaggataatatgtatccgatgcatgggcccgactttcccc

SEQ ID NO: 52 - DNA, 43 bp, synthetic construct
  misc_feature 1..43: note = Synthetic oligonucleotide
  source 1..43: mol_type = other DNA
tgcgttttccttggggttcagggtaggatgggggtggaggtgg

SEQ ID NO: 53 - DNA, 43 bp, synthetic construct
  misc_feature 1..43: note = Synthetic oligonucleotide
  source 1..43: mol_type = other DNA
ggggggcgggtgggctggtaaaaggtgatgcgggggtattgtt

SEQ ID NO: 54 - DNA, 43 bp, synthetic construct
  misc_feature 1..43: note = Synthetic oligonucleotide
  source 1..43: mol_type = other DNA
taggaggataatatgtatccggtgcatcggcccaactttcccc

SEQ ID NO: 55 - DNA, 43 bp, synthetic construct
  misc_feature 1..43: note = Synthetic oligonucleotide
  source 1..43: mol_type = other DNA
ccaatctcggaaggtttaaataaggtggtctttaggtctttag

SEQ ID NO: 56 - DNA, 43 bp, synthetic construct
  misc_feature 1..43: note = Synthetic oligonucleotide
  source 1..43: mol_type = other DNA
tacgttaagtgggtcgggaggggggaatagggggtttggttgg

SEQ ID NO: 57 - DNA, 43 bp, synthetic construct
  misc_feature 1..43: note = Synthetic oligonucleotide
  source 1..43: mol_type = other DNA
gtgaggtcggtggggcgggggatggtggggggtcgtttacatt

SEQ ID NO: 58 - DNA, 42 bp, synthetic construct
  misc_feature 1..42: note = Synthetic oligonucleotide
  source 1..42: mol_type = other DNA
cgatattgggggggggttggcgggctattttccgggtgggtg

SEQ ID NO: 59 - DNA, 43 bp, synthetic construct
  misc_feature 1..43: note = Synthetic oligonucleotide
  source 1..43: mol_type = other DNA
tcggttcctgttaattcgctggtggttggtggggtggcggatg

SEQ ID NO: 60 - DNA, 42 bp, synthetic construct
  misc_feature 1..42: note = Synthetic oligonucleotide
  source 1..42: mol_type = other DNA
gcggggaggtgggggtgggtggagggttggttactctctact

SEQ ID NO: 61 - DNA, 43 bp, synthetic construct
  misc_feature 1..43: note = Synthetic oligonucleotide
  source 1..43: mol_type = other DNA
cgggaatgggagggtgggggtggtggccgggtcgtgttatacc

SEQ ID NO: 62 - DNA, 43 bp, synthetic construct
  misc_feature 1..43: note = Synthetic oligonucleotide
  source 1..43: mol_type = other DNA
taggaggataatatgtatccggtgcatcggtccgactttcccc

SEQ ID NO: 63 - DNA, 43 bp, synthetic construct
  misc_feature 1..43: note = Synthetic oligonucleotide
  source 1..43: mol_type = other DNA
tatagttgggcgtaggcgggggggggtggttgggaggtccaag

SEQ ID NO: 64 - DNA, 43 bp, synthetic construct
  misc_feature 1..43: note = Synthetic oligonucleotide
  source 1..43: mol_type = other DNA
taggaggataatatgtatccggtgcatcggcccgaccttcccc

SEQ ID NO: 65 - DNA, 43 bp, synthetic construct
  misc_feature 1..43: note = Synthetic oligonucleotide
  source 1..43: mol_type = other DNA
tcgatcgtcctcaggatctcgtggttcaaatcataaagattat

SEQ ID NO: 66 - DNA, 43 bp, synthetic construct
  misc_feature 1..43: note = Synthetic oligonucleotide
  source 1..43: mol_type = other DNA
tgctgtctgggcgggggcggtcttgtggtttctttgggggggg

SEQ ID NO: 67 - DNA, 43 bp, synthetic construct
  misc_feature 1..43: note = Synthetic oligonucleotide
  source 1..43: mol_type = other DNA
gcgagacaggagggtggtcttatacgtgggggggggtggttgg

SEQ ID NO: 68 - DNA, 43 bp, synthetic construct
  misc_feature 1..43: note = Synthetic oligonucleotide
  source 1..43: mol_type = other DNA
taggagggctgaagacttgcttcttcccggtgcagttataaca

SEQ ID NO: 69 - DNA, 43 bp, synthetic construct
  misc_feature 1..43: note = Synthetic oligonucleotide
  source 1..43: mol_type = other DNA
cgtgtggggggtgggttgggctcgggttgttatcagttccatg

SEQ ID NO: 70 - DNA, 43 bp, synthetic construct
  misc_feature 1..43: note = Synthetic oligonucleotide
  source 1..43: mol_type = other DNA
cgatattggggggggggttggcgggctattttccgggtgggtg

SEQ ID NO: 71 - DNA, 43 bp, synthetic construct
  misc_feature 1..43: note = Synthetic oligonucleotide
  source 1..43: mol_type = other DNA
taggaggataatatgtatccggtgcatcggcccgactttcctc

SEQ ID NO: 72 - DNA, 43 bp, synthetic construct
  misc_feature 1..43: note = Synthetic oligonucleotide
  source 1..43: mol_type = other DNA
taggaggataatatgtatccggtgcatcggctcgactttcccc

SEQ ID NO: 73 - DNA, 43 bp, synthetic construct
  misc_feature 1..43: note = Synthetic oligonucleotide
  source 1..43: mol_type = other DNA
cttcgctcgtttcaatgtttagttctggtctttaggtctttag

SEQ ID NO: 74 - DNA, 43 bp, synthetic construct
  misc_feature 1..43: note = Synthetic oligonucleotide
  source 1..43: mol_type = other DNA
ggacatgggttgggtcgggagggggtggtcggttgggcagtaa

SEQ ID NO: 75 - DNA, 43 bp, synthetic construct
  misc_feature 1..43: note = Synthetic oligonucleotide
  source 1..43: mol_type = other DNA
taggaggataatatgtatacgatgcatcggcccgactttcccc

SEQ ID NO: 76 - DNA, 43 bp, synthetic construct
  misc_feature 1..43: note = Synthetic oligonucleotide
  source 1..43: mol_type = other DNA
taggaggataatatgtatcagatgcatcggcccgactttcccc

SEQ ID NO: 77 - DNA, 43 bp, synthetic construct
  misc_feature 1..43: note = Synthetic oligonucleotide
  source 1..43: mol_type = other DNA
tggatgtatggggtctcggggtgggagggttcaacttatctgg

SEQ ID NO: 78 - DNA, 43 bp, synthetic construct; identical to SEQ ID NO: 47
  misc_feature 1..43: note = Synthetic oligonucleotide
  source 1..43: mol_type = other DNA

SEQ ID NO: 79 - DNA, 43 bp, synthetic construct
  misc_feature 1..43: note = Synthetic oligonucleotide
  source 1..43: mol_type = other DNA
tcttgtacaaataggagggaagggggttttgggaggtgggtgg

SEQ ID NO: 80 - DNA, 43 bp, synthetic construct; identical to SEQ ID NO: 48
  misc_feature 1..43: note = Synthetic oligonucleotide
  source 1..43: mol_type = other DNA

SEQ ID NO: 81 - DNA, 43 bp, synthetic construct
  misc_feature 1..43: note = Synthetic oligonucleotide
  source 1..43: mol_type = other DNA
ctgatgttagtaggtcggggtccggttgggggttgggttgagg

SEQ ID NO: 82 - DNA, 43 bp, synthetic construct
  misc_feature 1..43: note = Synthetic oligonucleotide
  source 1..43: mol_type = other DNA
tggctcgtggacgtggtggtggcgggtcgtgggggtgggtagg

SEQ ID NO: 83 - DNA, 43 bp, synthetic construct
  misc_feature 1..43: note = Synthetic oligonucleotide
  source 1..43: mol_type = other DNA
taggaggataatatgtatccgatgcatcggcacgactttcccc

SEQ ID NO: 84 - DNA, 43 bp, synthetic construct
  misc_feature 1..43: note = Synthetic oligonucleotide
  source 1..43: mol_type = other DNA
cggggagggggggtcggggtatttattgtgtatgttttttgtg

SEQ ID NO: 85 - DNA, 43 bp, synthetic construct
  misc_feature 1..43: note = Synthetic oligonucleotide
  source 1..43: mol_type = other DNA
tgactgtatcttggggcgggttctggggggggtgtattgttca

SEQ ID NO: 86 - DNA, 43 bp, synthetic construct
  misc_feature 1..43: note = Synthetic oligonucleotide
  source 1..43: mol_type = other DNA
taggaggataatatgtatccgatgcatcggcccgactttcacc

SEQ ID NO: 87 - DNA, 43 bp, synthetic construct
  misc_feature 1..43: note = Synthetic oligonucleotide
  source 1..43: mol_type = other DNA
tcatgtctaggggggggaagtcggtttgggtgggtactctgtg

SEQ ID NO: 88 - DNA, 43 bp, synthetic construct
  misc_feature 1..43: note = Synthetic oligonucleotide
  source 1..43: mol_type = other DNA
cttgtttcgctttgggtttgggcgggtgggtcaattcctgttg

SEQ ID NO: 89 - DNA, 43 bp, synthetic construct
  misc_feature 1..43: note = Synthetic oligonucleotide
  source 1..43: mol_type = other DNA
ggtgggggccctcggtactgtggcggggtgggtgggtttagtg

SEQ ID NO: 90 - DNA, 43 bp, synthetic construct; identical to SEQ ID NO: 52
  misc_feature 1..43: note = Synthetic oligonucleotide
  source 1..43: mol_type = other DNA

SEQ ID NO: 91 - DNA, 43 bp, synthetic construct
  misc_feature 1..43: note = Synthetic oligonucleotide
  source 1..43: mol_type = other DNA
tggtggggtgggtctgtggggtggttttgttcttatcggggtt

SEQ ID NO: 92 - DNA, 43 bp, synthetic construct
  misc_feature 1..43: note = Synthetic oligonucleotide
  source 1..43: mol_type = other DNA
tgggtgggttacgggtgggtgttgttatcgcgctgatctggtt

SEQ ID NO: 93 - DNA, 43 bp, synthetic construct
  misc_feature 1..43: note = Synthetic oligonucleotide
  source 1..43: mol_type = other DNA
cgtgacggttttaatcaggggggggactctaacatttgggtgg

SEQ ID NO: 94 - DNA, 43 bp, synthetic construct
  misc_feature 1..43: note = Synthetic oligonucleotide
  source 1..43: mol_type = other DNA
tgctcatatcgtggggggatggggttgctagtggatggggtgg

SEQ ID NO: 95 - DNA, 43 bp, synthetic construct; identical to SEQ ID NO: 53
  misc_feature 1..43: note = Synthetic oligonucleotide
  source 1..43: mol_type = other DNA

SEQ ID NO: 96 - DNA, 43 bp, synthetic construct
  misc_feature 1..43: note = Synthetic oligonucleotide
  source 1..43: mol_type = other DNA
tgatgtggggggtggggtataatacttatgtttggggtttggg

SEQ ID NO: 97 - DNA, 43 bp, synthetic construct
  misc_feature 1..43: note = Synthetic oligonucleotide
  source 1..43: mol_type = other DNA
ttgggtgggtgggaatgggtattttttcttcgggcgatgtttg

SEQ ID NO: 98 - DNA, 43 bp, synthetic construct
  misc_feature 1..43: note = Synthetic oligonucleotide
  source 1..43: mol_type = other DNA
tagttggatactggatttgggagggatggggggaggagggtgg

SEQ ID NO: 99 - DNA, 42 bp, synthetic construct
  misc_feature 1..42: note = Synthetic oligonucleotide
  source 1..42: mol_type = other DNA
ctggaaggttgggtgtggggcgggggggaggtctctctatgt

SEQ ID NO: 100 - DNA, 43 bp, synthetic construct; identical to SEQ ID NO: 56
  misc_feature 1..43: note = Synthetic oligonucleotide
  source 1..43: mol_type = other DNA

SEQ ID NO: 101 - DNA, 43 bp, synthetic construct
  misc_feature 1..43: note = Synthetic oligonucleotide
  source 1..43: mol_type = other DNA
tgccgtgggccggggagggtgggttggcgtctctgtttcgata

SEQ ID NO: 102 - DNA, 43 bp, synthetic construct
  misc_feature 1..43: note = Synthetic oligonucleotide
  source 1..43: mol_type = other DNA
gggggggcggccggggtggactgtggcccgtcttcgtattgtt

SEQ ID NO: 103 - DNA, 42 bp, synthetic construct
  misc_feature 1..42: note = Synthetic oligonucleotide
  source 1..42: mol_type = other DNA
tggtggtggctgggggacgggtatcctggaattaggggtggg

SEQ ID NO: 104 - DNA, 43 bp, synthetic construct
  misc_feature 1..43: note = Synthetic oligonucleotide
  source 1..43: mol_type = other DNA
tcggttcatgttgggtgggatcggggcggggtttcttctcctg

SEQ ID NO: 105 - DNA, 43 bp, synthetic construct; identical to SEQ ID NO: 75
  misc_feature 1..43: note = Synthetic oligonucleotide
  source 1..43: mol_type = other DNA

SEQ ID NO: 106 - DNA, 43 bp, synthetic construct
  misc_feature 1..43: note = Synthetic oligonucleotide
  source 1..43: mol_type = other DNA
tcgtgggtgtgttctggggggcgtggacgggggttaatgggca

SEQ ID NO: 107 - DNA, 43 bp, synthetic construct
  misc_feature 1..43: note = Synthetic oligonucleotide
  source 1..43: mol_type = other DNA
taggaggataatatgtatccgatgcatcggcccgactttcccc

SEQ ID NO: 108 - DNA, 43 bp, synthetic construct
  misc_feature 1..43: note = Synthetic oligonucleotide
  source 1..43: mol_type = other DNA
taagagtcttaggatgacgtcattcgtccgtcacggtgcggga

SEQ ID NO: 109 - DNA, 43 bp, synthetic construct
  misc_feature 1..43: note = Synthetic oligonucleotide
  source 1..43: mol_type = other DNA
gcctggccagatagcagttaccttacgggatctatattcaccg

SEQ ID NO: 110 - DNA, 43 bp, synthetic construct; identical to SEQ ID NO: 82
  misc_feature 1..43: note = Synthetic oligonucleotide
  source 1..43: mol_type = other DNA

SEQ ID NO: 111 - DNA, 43 bp, synthetic construct
  misc_feature 1..43: note = Synthetic oligonucleotide
  source 1..43: mol_type = other DNA
ttcgtgttcatctgtttattgttattcacaatccgtcttttgt

SEQ ID NO: 112 - DNA, 43 bp, synthetic construct
  misc_feature 1..43: note = Synthetic oligonucleotide
  source 1..43: mol_type = other DNA
cgaatccgtcgaccgccctcgtaaccatccaacccagtctcct

SEQ ID NO: 113 - DNA, 43 bp, synthetic construct
  misc_feature 1..43: note = Synthetic oligonucleotide
  source 1..43: mol_type = other DNA
caggaaagttacttatcttttagacggttatgttctcattact

SEQ ID NO: 114 - DNA, 43 bp, synthetic construct
  misc_feature 1..43: note = Synthetic oligonucleotide
  source 1..43: mol_type = other DNA
atctgctcgatacgtagatagtctgctcgatacaaaagggtgg

SEQ ID NO: 115 - DNA, 43 bp, synthetic construct
  misc_feature 1..43: note = Synthetic oligonucleotide
  source 1..43: mol_type = other DNA
cgatgagcgggctccgatattgtgtcggcgtgactaccttgat

SEQ ID NO: 116 - DNA, 43 bp, synthetic construct
  misc_feature 1..43: note = Synthetic oligonucleotide
  source 1..43: mol_type = other DNA
ggtcggcctatttattgcggcacgttgtttcttgatgtcgccc

SEQ ID NO: 117 - DNA, 43 bp, synthetic construct
  misc_feature 1..43: note = Synthetic oligonucleotide
  source 1..43: mol_type = other DNA
tcgaattcagttctacatgtgtatttcttgctccgtttcagaa

SEQ ID NO: 118 - DNA, 43 bp, synthetic construct
  misc_feature 1..43: note = Synthetic oligonucleotide
  source 1..43: mol_type = other DNA
tcggtccggcaacaaaccccacgcgccttcgatatgcctgtcg

SEQ ID NO: 119 - DNA, 43 bp, synthetic construct; identical to SEQ ID NO: 55
  misc_feature 1..43: note = Synthetic oligonucleotide
  source 1..43: mol_type = other DNA

SEQ ID NO: 120 - DNA, 43 bp, synthetic construct; identical to SEQ ID NO: 70
  misc_feature 1..43: note = Synthetic oligonucleotide
  source 1..43: mol_type = other DNA

SEQ ID NO: 121 - DNA, 43 bp, synthetic construct; identical to SEQ ID NO: 61
  misc_feature 1..43: note = Synthetic oligonucleotide
  source 1..43: mol_type = other DNA

SEQ ID NO: 122 - DNA, 43 bp, synthetic construct
  misc_feature 1..43: note = Synthetic oligonucleotide
  source 1..43: mol_type = other DNA
cgtggtgggttcttgggtggggggggagggttggcgtagtata

SEQ ID NO: 123 - DNA, 43 bp, synthetic construct; identical to SEQ ID NO: 57
  misc_feature 1..43: note = Synthetic oligonucleotide
  source 1..43: mol_type = other DNA

SEQ ID NO: 124 - DNA, 43 bp, synthetic construct; identical to SEQ ID NO: 56
  misc_feature 1..43: note = Synthetic oligonucleotide
  source 1..43: mol_type = other DNA

SEQ ID NO: 125 - DNA, 43 bp, synthetic construct; identical to SEQ ID NO: 54
  misc_feature 1..43: note = Synthetic oligonucleotide
  source 1..43: mol_type = other DNA

SEQ ID NO: 126 - DNA, 43 bp, synthetic construct; identical to SEQ ID NO: 50
  misc_feature 1..43: note = Synthetic oligonucleotide
  source 1..43: mol_type = other DNA

SEQ ID NO: 127 - DNA, 43 bp, synthetic construct; identical to SEQ ID NO: 59
  misc_feature 1..43: note = Synthetic oligonucleotide
  source 1..43: mol_type = other DNA

SEQ ID NO: 128 - DNA, 43 bp, synthetic construct; identical to SEQ ID NO: 66
  misc_feature 1..43: note = Synthetic oligonucleotide
  source 1..43: mol_type = other DNA

SEQ ID NO: 129 - DNA, 43 bp, synthetic construct
  misc_feature 1..43: note = Synthetic oligonucleotide
  source 1..43: mol_type = other DNA
aacatggggttctgataaacctgtgccaaatacattgttgagt

SEQ ID NO: 130 - DNA, 43 bp, synthetic construct
  misc_feature 1..43: note = Synthetic oligonucleotide
  source 1..43: mol_type = other DNA
attcctcctttgtaagggatgatatccaactcctctgcgttcg

SEQ ID NO: 131 - DNA, 20 bp, synthetic construct
  misc_feature 1..20: note = Synthetic oligonucleotide
  source 1..20: mol_type = other DNA
ctagcatgactgcagtacgt

SEQ ID NO: 132 - DNA, 33 bp, synthetic construct
  misc_feature 1..33: note = Synthetic oligonucleotide
  source 1..33: mol_type = other DNA
ctgtctcttatacacatctgacgctgccgacga

SEQ ID NO: 133 - DNA, 15 bp, synthetic construct
  misc_feature 1..15: note = Synthetic oligonucleotide
  source 1..15: mol_type = other DNA
  modified_base 1: mod_base = OTHER; note = Phosphorylated nucleotide
tcgtcggcagcgtca

SEQ ID NO: 134 - protein, 8 aa, synthetic construct
  REGION 1..8: note = Synthetic peptide
DYKDDDDK

SEQ ID NO: 135 - protein, 9 aa, synthetic construct
  REGION 1..9: note = Synthetic peptide
YPYDVPDYA

SEQ ID NO: 136 - protein, 10 aa, synthetic construct
  REGION 1..10: note = Synthetic peptide
EQKLISEEDL

SEQ ID NO: 137 - DNA, 35 bp, synthetic construct
  misc_feature 1..35: note = Synthetic oligonucleotide
  source 1..35: mol_type = other DNA
aacccgcgtgattggggtactgcccatgcgacttt

SEQ ID NO: 138 - DNA, 35 bp, synthetic construct
  misc_feature 1..35: note = Synthetic oligonucleotide
  source 1..35: mol_type = other DNA
aactgaaggccaattaaactccactgtgctaatct

SEQ ID NO: 139 - DNA, 38 bp, synthetic construct
  misc_feature 1..38: note = Synthetic oligonucleotide
  source 1..38: mol_type = other DNA
acatgccggcgttgatactctactgtgctccattatga

SEQ ID NO: 140 - DNA, 36 bp, synthetic construct
  misc_feature 1..36: note = Synthetic oligonucleotide
  source 1..36: mol_type = other DNA
agacatgccacgccctttacatactccactgtgcca

SEQ ID NO: 141 - DNA, 34 bp, synthetic construct
  misc_feature 1..34: note = Synthetic oligonucleotide
  source 1..34: mol_type = other DNA
agccacgcagacctatctctactgtgccaatgtt

SEQ ID NO: 142 - DNA, 37 bp, synthetic construct
  misc_feature 1..37: note = Synthetic oligonucleotide
  source 1..37: mol_type = other DNA
aggtacgtaaggctgccattactctctactgtgccga

SEQ ID NO: 143 - DNA, 35 bp, synthetic construct
  misc_feature 1..35: note = Synthetic oligonucleotide
  source 1..35: mol_type = other DNA
agtctagcgatcgacttttctctacggtgcccttc

SEQ ID NO: 144 - DNA, 37 bp, synthetic construct
  misc_feature 1..37: note = Synthetic oligonucleotide
  source 1..37: mol_type = other DNA
agtgtgcgcatgaatccattactccactgtgccttga

SEQ ID NO: 145 - DNA, 37 bp, synthetic construct
  misc_feature 1..37: note = Synthetic oligonucleotide
  source 1..37: mol_type = other DNA
agttgcagacccttgtattctctaccgtgccctatga

SEQ ID NO: 146 - DNA, 34 bp, synthetic construct
  misc_feature 1..34: note = Synthetic oligonucleotide
  source 1..34: mol_type = other DNA
cactgctaactgatattgttgaactccaccgtgc

SEQ ID NO: 147 - DNA, 38 bp, synthetic construct
  misc_feature 1..38: note = Synthetic oligonucleotide
  source 1..38: mol_type = other DNA
catgcgacaagcttccattaaccatccgctatttatga

SEQ ID NO: 148 - DNA, 36 bp, synthetic construct
  misc_feature 1..36: note = Synthetic oligonucleotide
  source 1..36: mol_type = other DNA
catgcggaccacgctttcacaaactcatgattcaaa

SEQ ID NO: 149 - DNA, 35 bp, synthetic construct
  misc_feature 1..35: note = Synthetic oligonucleotide
  source 1..35: mol_type = other DNA
catgcgtacgtcctattctctctactgtgcattaa

SEQ ID NO: 150 - DNA, 35 bp, synthetic construct
  misc_feature 1..35: note = Synthetic oligonucleotide
  source 1..35: mol_type = other DNA
cctgcaatgcggaaacccttctactctactgtgcc

SEQ ID NO: 151 - DNA, 36 bp, synthetic construct
  misc_feature 1..36: note = Synthetic oligonucleotide
  source 1..36: mol_type = other DNA
cgcgagccagggtactgcctgcggtctaaacaatca

SEQ ID NO: 152 - DNA, 36 bp, synthetic construct
  misc_feature 1..36: note = Synthetic oligonucleotide
  source 1..36: mol_type = other DNA
cgtgcgacttgttctctactgtgccaataaaccata

SEQ ID NO: 153 - DNA, 35 bp, synthetic construct
  misc_feature 1..35: note = Synthetic oligonucleotide
  source 1..35: mol_type = other DNA
gatagcgcatattcctctactgtgctacttgttat

SEQ ID NO: 154 - DNA, 36 bp, synthetic construct
  misc_feature 1..36: note = Synthetic oligonucleotide
  source 1..36: mol_type = other DNA
gcaaaccaattagtgtacctctaccgtgcccaatga

SEQ ID NO: 155 - DNA, 38 bp, synthetic construct
  misc_feature 1..38: note = Synthetic oligonucleotide
  source 1..38: mol_type = other DNA
gcaactactctctaccgtgcccagtgatttctccatga

SEQ ID NO: 156 - DNA, 36 bp, synthetic construct
  misc_feature 1..36: note = Synthetic oligonucleotide
  source 1..36: mol_type = other DNA
gcaccacatgtcaatctctactgtgcttatctcata

SEQ ID NO: 157 - DNA, 36 bp, synthetic construct
  misc_feature 1..36: note = Synthetic oligonucleotide
  source 1..36: mol_type = other DNA
gcagcacaaaagttactctcctctaccgtgccccta

SEQ ID NO: 158 - DNA, 36 bp, synthetic construct
  misc_feature 1..36: note = Synthetic oligonucleotide
  source 1..36: mol_type = other DNA
gcagtttgcgtggatactctactgtgctgaccctta

SEQ ID NO: 159 - DNA, 36 bp, synthetic construct
  misc_feature 1..36: note = Synthetic oligonucleotide
  source 1..36: mol_type = other DNA
gcatacatgaactctaccgtgcccgttgacttgaaa

SEQ ID NO: 160 - DNA, 35 bp, synthetic construct
  misc_feature 1..35: note = Synthetic oligonucleotide
  source 1..35: mol_type = other DNA
gcatagcggttcacattattttactctaccgtgcc

SEQ ID NO: 161 - DNA, 34 bp, synthetic construct
  misc_feature 1..34: note = Synthetic oligonucleotide
  source 1..34: mol_type = other DNA
gccacagtatcgttctcgagctggttcccgccat

SEQ ID NO: 162 - DNA, 38 bp, synthetic construct
  misc_feature 1..38: note = Synthetic oligonucleotide
  source 1..38: mol_type = other DNA
gcgaacatcactctaccgtgccatctgaaatgacgtga

SEQ ID NO: 163 - DNA, 38 bp, synthetic construct
  misc_feature 1..38: note = Synthetic oligonucleotide
  source 1..38: mol_type = other DNA
gcgaacttgtaactctactgtgcttatattaaggttga

SEQ ID NO: 164 - DNA, 35 bp, synthetic construct
  misc_feature 1..35: note = Synthetic oligonucleotide
  source 1..35: mol_type = other DNA
gcgaccaatactctactgtgctgatacggatttta

SEQ ID NO: 165 - DNA, 35 bp, synthetic construct
  misc_feature 1..35: note = Synthetic oligonucleotide
  source 1..35: mol_type = other DNA
gcgaccactctataacctcaaccgtgctcactcct

SEQ ID NO: 166 - DNA, 37 bp, synthetic construct
  misc_feature 1..37: note = Synthetic oligonucleotide
  source 1..37: mol_type = other DNA
gcgcaagttgtctctaccgtgccccgaaagttttgga

SEQ ID NO: 167 - DNA, 35 bp, synthetic construct
  misc_feature 1..35: note = Synthetic oligonucleotide
  source 1..35: mol_type = other DNA
gcgcaccacctacattgtctccaccgtgctttatt

SEQ ID NO: 168 - DNA, 36 bp, synthetic construct
  misc_feature 1..36: note = Synthetic oligonucleotide
  source 1..36: mol_type = other DNA
gcgcacccacgtgaactctaccgtgcctatttccta

SEQ ID NO: 169 - DNA, 38 bp, synthetic construct
  misc_feature 1..38: note = Synthetic oligonucleotide
  source 1..38: mol_type = other DNA
gcgcaccgacctctaccgtgccaaaataggttatctga

SEQ ID NO: 170 - DNA, 35 bp, synthetic construct
  misc_feature 1..35: note = Synthetic oligonucleotide
  source 1..35: mol_type = other DNA
gcgccaccacacaaaccttccctatcgagggagat

SEQ ID NO: 171 - DNA, 37 bp, synthetic construct
  misc_feature 1..37: note = Synthetic oligonucleotide
  source 1..37: mol_type = other DNA
gcgcggactatattactctactgtgccctgcttatga

SEQ ID NO: 172 - DNA, 35 bp, synthetic construct
  misc_feature 1..35: note = Synthetic oligonucleotide
  source 1..35: mol_type = other DNA
gcggataggacaataacttactccactgtgccatc

SEQ ID NO: 173 - DNA, 35 bp, synthetic construct
  misc_feature 1..35: note = Synthetic oligonucleotide
  source 1..35: mol_type = other DNA
gcggtgacctctactgtgcgccccaagccttagtt

SEQ ID NO: 174 - DNA, 38 bp, synthetic construct
  misc_feature 1..38: note = Synthetic oligonucleotide
  source 1..38: mol_type = other DNA
gcgtacagaacctctaccgtgcccactcacttccatga

SEQ ID NO: 175 - DNA, 35 bp, synthetic construct
  misc_feature 1..35: note = Synthetic oligonucleotide
  source 1..35: mol_type = other DNA
gcgtcccctcccggatggtcctttctctactgtgc

SEQ ID NO: 176 - DNA, 35 bp, synthetic construct
  misc_feature 1..35: note = Synthetic oligonucleotide
  source 1..35: mol_type = other DNA
gcgtgctaacggtatgcaagacgtatgcgattttc

SEQ ID NO: 177 - DNA, 35 bp, synthetic construct
  misc_feature 1..35: note = Synthetic oligonucleotide
  source 1..35: mol_type = other DNA
gctagaccgatccacctcaaacctctactgtgcct

SEQ ID NO: 178 - DNA, 35 bp, synthetic construct
  misc_feature 1..35: note = Synthetic oligonucleotide
  source 1..35: mol_type = other DNA
gctagcttagctctaccgtgcacattccgctattt

SEQ ID NO: 179 - DNA, 35 bp, synthetic construct
  misc_feature 1..35: note = Synthetic oligonucleotide
  source 1..35: mol_type = other DNA
ggtgcaggcaagatattttactctactgtgcattt

SEQ ID NO: 180 - DNA, 35 bp, synthetic construct
  misc_feature 1..35: note = Synthetic oligonucleotide
  source 1..35: mol_type = other DNA
gtaaatgtacatgcgtatcctcacctctactgtgc

SEQ ID NO: 181 - DNA, 35 bp, synthetic construct
  misc_feature 1..35: note = Synthetic oligonucleotide
  source 1..35: mol_type = other DNA
taacacgtctttcactctactgtgccctttatgcc

SEQ ID NO: 182 - DNA, 38 bp, synthetic construct
  misc_feature 1..38: note = Synthetic oligonucleotide
  source 1..38: mol_type = other DNA
taatggcatgcggacctatcctctaccgtgctccttga

SEQ ID NO: 183 - DNA, 35 bp, synthetic construct
  misc_feature 1..35: note = Synthetic oligonucleotide
  source 1..35: mol_type = other DNA
tatgcgatttctctaccgtgccaatatgccttgtt

SEQ ID NO: 184 - DNA, 36 bp, synthetic construct
  misc_feature 1..36: note = Synthetic oligonucleotide
  source 1..36: mol_type = other DNA
tctgcgattctaccgttactctaccgtgccaccaaa

SEQ ID NO: 185 - DNA, 36 bp, synthetic construct
  misc_feature 1..36: note = Synthetic oligonucleotide
  source 1..36: mol_type = other DNA
tgcgcagtcatttcgccatgttctctaccgtgccaa

SEQ ID NO: 186 - DNA, 38 bp, synthetic construct
  misc_feature 1..38: note = Synthetic oligonucleotide
  source 1..38: mol_type = other DNA
tgtcaggcggtagtactctccaccgtgcctattgttga

SEQ ID NO: 187 - DNA, 35 bp, synthetic construct
  misc_feature 1..35: note = Synthetic oligonucleotide
  source 1..35: mol_type = other DNA
acatgcataccctacgaatcgttccatcaccatac

SEQ ID NO: 188 - DNA, 35 bp, synthetic construct
  misc_feature 1..35: note = Synthetic oligonucleotide
  source 1..35: mol_type = other DNA
agtcagtgcgcccgctatttacgatctcactgttc

SEQ ID NO: 189 - DNA, 35 bp, synthetic construct
  misc_feature 1..35: note = Synthetic oligonucleotide
  source 1..35: mol_type = other DNA
agtgcagtcgcgatgggaacttcttctttgcttta

SEQ ID NO: 190 - DNA, 36 bp, synthetic construct
  misc_feature 1..36: note = Synthetic oligonucleotide
  source 1..36: mol_type = other DNA
atggccatgcgaaccgaaacctagcccattttccta

SEQ ID NO: 191 - DNA, 34 bp, synthetic construct
  misc_feature 1..34: note = Synthetic oligonucleotide
  source 1..34: mol_type = other DNA
attgcggtcatccccttccacgctataccaccat

SEQ ID NO: 192 - DNA, 35 bp, synthetic construct
  misc_feature 1..35: note = Synthetic oligonucleotide
  source 1..35: mol_type = other DNA
cactgcaggtcactggcgccctatttcctcacatt

SEQ ID NO: 193 - DNA, 35 bp, synthetic construct
  misc_feature 1..35: note = Synthetic oligonucleotide
  source 1..35: mol_type = other DNA
catgcccgtaaacgcctaatctaccaccttttgct

SEQ ID NO: 194 - DNA, 35 bp, synthetic construct
  misc_feature 1..35: note = Synthetic oligonucleotide
  source 1..35: mol_type = other DNA
catgccgcctttcgacttccatatcccaacacgcc

SEQ ID NO: 195 - DNA, 35 bp, synthetic construct
  misc_feature 1..35: note = Synthetic oligonucleotide
  source 1..35: mol_type = other DNA
catgccggtcattccatactcaaactcattcactc

SEQ ID NO: 196 - DNA, 35 bp, synthetic construct
  misc_feature 1..35: note = Synthetic oligonucleotide
  source 1..35: mol_type = other DNA
catgcgagctacccttatcatctcatgtttgcttt

SEQ ID NO: 197 - DNA, 35 bp, synthetic construct
  misc_feature 1..35: note = Synthetic oligonucleotide
  source 1..35: mol_type = other DNA
catgcgattgcgccccattccttgccttatctcac

SEQ ID NO: 198 - DNA, 36 bp, synthetic construct
  misc_feature 1..36: note = Synthetic oligonucleotide
  source 1..36: mol_type = other DNA
catgcgcacatcgtactccgtagccctaaattatca

SEQ ID NO: 199 - DNA, 35 bp, synthetic construct
  misc_feature 1..35: note = Synthetic oligonucleotide
  source 1..35: mol_type = other DNA
catgcgccctgtgcgttctctactaccctaatcat

SEQ ID NO: 200 - DNA, 38 bp, synthetic construct
  misc_feature 1..38: note = Synthetic oligonucleotide
  source 1..38: mol_type = other DNA
catgtacgcacacccactgattctttaccacccactga

SEQ ID NO: 201 - DNA, 35 bp, synthetic construct
  misc_feature 1..35: note = Synthetic oligonucleotide
  source 1..35: mol_type = other DNA
gcaggacaccccctcattatttgtttcatcctacg

SEQ ID NO: 202 - DNA, 35 bp, synthetic construct
  misc_feature 1..35: note = Synthetic oligonucleotide
  source 1..35: mol_type = other DNA
gcatcaggcgcactttcatttgctaatcgtttttt

SEQ ID NO: 203 - DNA, 35 bp, synthetic construct
  misc_feature 1..35: note = Synthetic oligonucleotide
  source 1..35: mol_type = other DNA
gccatgcgagagggttattgttgatctcatgggtt

SEQ ID NO: 204 - DNA, 35 bp, synthetic construct
  misc_feature 1..35: note = Synthetic oligonucleotide
  source 1..35: mol_type = other DNA
gcgataaagcccatgtaaccctctgaaaacccgat

SEQ ID NO: 205 - DNA, 35 bp, synthetic construct
  misc_feature 1..35: note = Synthetic oligonucleotide
  source 1..35: mol_type = other DNA
gcgccacgagctacccgacttccgattactttctt

SEQ ID NO: 206 - DNA, 35 bp, synthetic construct
  misc_feature 1..35: note = Synthetic oligonucleotide
  source 1..35: mol_type = other DNA
gcggacatcgggcactttatacaaccacctttttg

SEQ ID NO: 207 - DNA, 36 bp, synthetic construct
  misc_feature 1..36: note = Synthetic oligonucleotide
  source 1..36: mol_type = other DNA
gctgcaggccgtcccaaatattcgctcccacacata

SEQ ID NO: 208 - DNA, 35 bp, synthetic construct
  misc_feature 1..35: note = Synthetic oligonucleotide
  source 1..35: mol_type = other DNA
gctggtcaggcgttccacacttcctacccgctttt

SEQ ID NO: 209 - DNA, 35 bp, synthetic construct
  misc_feature 1..35: note = Synthetic oligonucleotide
  source 1..35: mol_type = other DNA
tatgcgcaggaccacctattacacgaccttatcct

SEQ ID NO: 210 - DNA, 35 bp, synthetic construct
  misc_feature 1..35: note = Synthetic oligonucleotide
  source 1..35: mol_type = other DNA
tcaactggggtcagtgccaacgcttactttcttct

SEQ ID NO: 211 - DNA, 35 bp, synthetic construct
  misc_feature 1..35: note = Synthetic oligonucleotide
  source 1..35: mol_type = other DNA
tcaagcagtcatagccggtttcacgctttacttac

SEQ ID NO: 212 - DNA, 35 bp, synthetic construct
  misc_feature 1..35: note = Synthetic oligonucleotide
  source 1..35: mol_type = other DNA
aaaacacgcaaactacctggaaacttgacttcttt

SEQ ID NO: 213 - DNA, 35 bp, synthetic construct
  misc_feature 1..35: note = Synthetic oligonucleotide
  source 1..35: mol_type = other DNA
aaaacactcacgatacctaccctggtcttcacaac

SEQ ID NO: 214 - DNA, 35 bp, synthetic construct
  misc_feature 1..35: note = Synthetic oligonucleotide
  source 1..35: mol_type = other DNA
aaaacagcaggcattttcctgtactttcgaattca

SEQ ID NO: 215 - DNA, 35 bp, synthetic construct
  misc_feature 1..35: note = Synthetic oligonucleotide
  source 1..35: mol_type = other DNA
aaaaccacagctaccattatcgcattggccctact

SEQ ID NO: 216 - DNA, 35 bp, synthetic construct
  misc_feature 1..35: note = Synthetic oligonucleotide
  source 1..35: mol_type = other DNA
aaaacccaagcaccgaacgaactatccctttttct

SEQ ID NO: 217 - DNA, 35 bp, synthetic construct
  misc_feature 1..35: note = Synthetic oligonucleotide
  source 1..35: mol_type = other DNA
aaaacccaccacgcgtcgtacgcataccacccttt

SEQ ID NO: 218 - DNA, 35 bp, synthetic construct
  misc_feature 1..35: note = Synthetic oligonucleotide
  source 1..35: mol_type = other DNA
aaaaccggtcctgcgccttcttctccgcttttatt

SEQ ID NO: 219 - DNA, 35 bp, synthetic construct
  misc_feature 1..35: note = Synthetic oligonucleotide
  source 1..35: mol_type = other DNA
caggtactgtggcaggcgatccattgctctctttt

SEQ ID NO: 220 - DNA, 35 bp, synthetic construct
  misc_feature 1..35: note = Synthetic oligonucleotide
  source 1..35: mol_type = other DNA
caggtcagcagtccaggcgattactttctcttttc

SEQ ID NO: 221 - DNA, 35 bp, synthetic construct
  misc_feature 1..35: note = Synthetic oligonucleotide
  source 1..35: mol_type = other DNA
cagtaaccgctgtctgtcatttttcaacattctgt

SEQ ID NO: 222 - DNA, 36 bp, synthetic construct
  misc_feature 1..36: note = Synthetic oligonucleotide
  source 1..36: mol_type = other DNA
cagtaactgtagtcgtcgaaccttgcttacaaccca

SEQ ID NO: 223 - DNA, 35 bp, synthetic construct
  misc_feature 1..35: note = Synthetic oligonucleotide
  source 1..35: mol_type = other DNA
cagtaaggaagctcatgcggtacaggtctacctcg

SEQ ID NO: 224 - DNA, 38 bp, synthetic construct
  misc_feature 1..38: note = Synthetic oligonucleotide
  source 1..38: mol_type = other DNA
cagtaagtgctgtcactgcgccacttgtaaatacttga

SEQ ID NO: 225 - DNA, 36 bp, synthetic construct
  misc_feature 1..36: note = Synthetic oligonucleotide
  source 1..36: mol_type = other DNA
cagtaatgcgaagctagtacgttctctcttatttta

SEQ ID NO: 226 - DNA, 35 bp, synthetic construct
  misc_feature 1..35: note = Synthetic oligonucleotide
  source 1..35: mol_type = other DNA
cagtacaaacatcgcgattctttccttgatactgt

SEQ ID NO: 227 - DNA, 35 bp, synthetic construct
  misc_feature 1..35: note = Synthetic oligonucleotide
  source 1..35: mol_type = other DNA
gagggcggctctaatgcatgcgctttcatctttgc

SEQ ID NO: 228 - DNA, 36 bp, synthetic construct
  misc_feature 1..36: note = Synthetic oligonucleotide
  source 1..36: mol_type = other DNA
gagggcgggcagtcatttcgattatatctgcctaca

SEQ ID NO: 229 - DNA, 37 bp, synthetic construct
  misc_feature 1..37: note = Synthetic oligonucleotide
  source 1..37: mol_type = other DNA
gagggcggtccaacgcgcaatgtcttttttcttccga

SEQ ID NO: 230 - DNA, 35 bp, synthetic construct
  misc_feature 1..35: note = Synthetic oligonucleotide
  source 1..35: mol_type = other DNA
gagggcgtacaggagtcttgcggtccacattttat

SEQ ID NO: 231 - DNA, 35 bp, synthetic construct
  misc_feature 1..35: note = Synthetic oligonucleotide
  source 1..35: mol_type = other DNA
gagggctactgaagttaatggcattcttctctatc

SEQ ID NO: 232 - DNA, 35 bp, synthetic construct
  misc_feature 1..35: note = Synthetic oligonucleotide
  source 1..35: mol_type = other DNA
gagggctcatgccagccgcttttcttacctttatc

SEQ ID NO: 233 - DNA, 38 bp, synthetic construct
  misc_feature 1..38: note = Synthetic oligonucleotide
  source 1..38: mol_type = other DNA
gagggctgaacaagtagtgcgtacattttccttcctga

SEQ ID NO: 234 - DNA, 35 bp, synthetic construct
  misc_feature 1..35: note = Synthetic oligonucleotide
  source 1..35: mol_type = other DNA
gagggctgcaggcatccaatttcctccttgtccct

SEQ ID NO: 235 - DNA, 35 bp, synthetic construct
  misc_feature 1..35: note = Synthetic oligonucleotide
  source 1..35: mol_type = other DNA
gaggggccgtccttcgtacggaatgtgcatgcgct

SEQ ID NO: 236 - DNA, 35 bp, synthetic construct
  misc_feature 1..35: note = Synthetic oligonucleotide
  source 1..35: mol_type = other DNA
gaggggcggtcattgccgttagcctcctttcgcct

SEQ ID NO: 237 - DNA, 37 bp, synthetic construct
  misc_feature 1..37: note = Synthetic oligonucleotide
  source 1..37: mol_type = other DNA
gcgaaactcgccatatacttaaacttgcccttttgga

SEQ ID NO: 238 - DNA, 38 bp, synthetic construct
  misc_feature 1..38: note = Synthetic oligonucleotide
  source 1..38: mol_type = other DNA
aactgcacgtaaccttaatcactccaccgtgccattga

SEQ ID NO: 239 - DNA, 36 bp, synthetic construct
  misc_feature 1..36: note = Synthetic oligonucleotide
  source 1..36: mol_type = other DNA
ttcgccgttaagcatcgtgtcatgcgcaactgttaa

SEQ ID NO: 240 - DNA, 35 bp, synthetic construct
  misc_feature 1..35: note = Synthetic oligonucleotide
  source 1..35: mol_type = other DNA
acgcggacctagcatatcgtagtgcgtggcacttt

SEQ ID NO: 241 - DNA, 35 bp, synthetic construct
  misc_feature 1..35: note = Synthetic oligonucleotide
  source 1..35: mol_type = other DNA
tatgcgcgccatcaccggaactaggtttgggcttt

SEQ ID NO: 242 - DNA, 35 bp, synthetic construct
  misc_feature 1..35: note = Synthetic oligonucleotide
  source 1..35: mol_type = other DNA
gagtacggaatcgtgtcatcagctggatacttttt

SEQ ID NO: 243 - DNA, 38 bp, synthetic construct
  misc_feature 1..38: note = Synthetic oligonucleotide
  source 1..38: mol_type = other DNA
atgcactgggctgaccggtattgcgtatttctctttga

SEQ ID NO: 244 - DNA, 35 bp, synthetic construct
  misc_feature 1..35: note = Synthetic oligonucleotide
  source 1..35: mol_type = other DNA
tatgccccgttccattcttcattcactactagccc

SEQ ID NO: 245 - DNA, 36 bp, synthetic construct
  misc_feature 1..36: note = Synthetic oligonucleotide
  source 1..36: mol_type = other DNA
aagcacaggtactagcaggttcgcactccctgacta

SEQ ID NO: 246 - DNA, 35 bp, synthetic construct
  misc_feature 1..35: note = Synthetic oligonucleotide
  source 1..35: mol_type = other DNA
cacgccccaatatgccatactctactgtgcccctt

SEQ ID NO: 247 - DNA, 35 bp, synthetic construct
  misc_feature 1..35: note = Synthetic oligonucleotide
  source 1..35: mol_type = other DNA
aatgcgcgctaaagaaggacttgtcttgccagccc

SEQ ID NO: 248 - DNA, 35 bp, synthetic construct
  misc_feature 1..35: note = Synthetic oligonucleotide
  source 1..35: mol_type = other DNA
gaacggatcgtagtgaaacaggactggagcggccc

SEQ ID NO: 249 - DNA, 35 bp, synthetic construct
  misc_feature 1..35: note = Synthetic oligonucleotide
  source 1..35: mol_type = other DNA
tcgtaggacaaaggcactggttgaatcttttctat

SEQ ID NO: 250 - DNA, 35 bp, synthetic construct
  misc_feature 1..35: note = Synthetic oligonucleotide
  source 1..35: mol_type = other DNA
tgcgcgctaaacactgcaagtctagccccgcattc

SEQ ID NO: 251 - DNA, 35 bp, synthetic construct
  misc_feature 1..35: note = Synthetic oligonucleotide
  source 1..35: mol_type = other DNA
tcacctaccaagtctccaatcattgcaccctctac

SEQ ID NO: 252 - DNA, 36 bp, synthetic construct
  misc_feature 1..36: note = Synthetic oligonucleotide
  source 1..36: mol_type = other DNA
gcctatcaatgtctctctactgtgccggacttttta

SEQ ID NO: 253 - DNA, 36 bp, synthetic construct
  misc_feature 1..36: note = Synthetic oligonucleotide
  source 1..36: mol_type = other DNA
aggactgcccccgcctgactctactgtgccatctca

SEQ ID NO: 254 - DNA, 35 bp, synthetic construct
  misc_feature 1..35: note = Synthetic oligonucleotide
  source 1..35: mol_type = other DNA
ggtagctccaccgtgccatactcgatctttgttac

SEQ ID NO: 255 - DNA, 38 bp, synthetic construct
  misc_feature 1..38: note = Synthetic oligonucleotide
  source 1..38: mol_type = other DNA
ttccgcgacctaactccaccgtgccataatccctttga

SEQ ID NO: 256 - DNA, 36 bp, synthetic construct
  misc_feature 1..36: note = Synthetic oligonucleotide
  source 1..36: mol_type = other DNA
agacttaagcaaggtcgtacgtaggtagtcccacca

SEQ ID NO: 257 - DNA, 36 bp, synthetic construct
  misc_feature 1..36: note = Synthetic oligonucleotide
  source 1..36: mol_type = other DNA
gctaactgcaggccccctatccgacctaaatataca

SEQ ID NO: 258 - DNA, 36 bp, synthetic construct
  misc_feature 1..36: note = Synthetic oligonucleotide
  source 1..36: mol_type = other DNA
atcgtagtacgaatgtcaagcgtacacgctttccta

SEQ ID NO: 259 - DNA, 36 bp, synthetic construct
  misc_feature 1..36: note = Synthetic oligonucleotide
  source 1..36: mol_type = other DNA
gcgttgatctctaccgtgcaccgaacactccccaca

SEQ ID NO: 260 - DNA, 38 bp, synthetic construct
  misc_feature 1..38: note = Synthetic oligonucleotide
  source 1..38: mol_type = other DNA
gccgctatatcaatcctctactgtgcgaattaacctga

SEQ ID NO: 261 - DNA, 35 bp, synthetic construct
  misc_feature 1..35: note = Synthetic oligonucleotide
  source 1..35: mol_type = other DNA
ttgctgttatcgtcctctactgtgccggtattcct

SEQ ID NO: 262 - DNA, 35 bp, synthetic construct
  misc_feature 1..35: note = Synthetic oligonucleotide
  source 1..35: mol_type = other DNA
gtcatgcggaagctttcctgttttggtataatgtc

SEQ ID NO: 263 - DNA, 36 bp, synthetic construct
  misc_feature 1..36: note = Synthetic oligonucleotide
  source 1..36: mol_type = other DNA
gcgaacagatttctctacggtgcttacacatattta

SEQ ID NO: 264 - DNA, 36 bp, synthetic construct
  misc_feature 1..36: note = Synthetic oligonucleotide
  source 1..36: mol_type = other DNA
actggaaggagtcctacctgcctgacgcgtgacgta

SEQ ID NO: 265 - DNA, 38 bp, synthetic construct
  misc_feature 1..38: note = Synthetic oligonucleotide
  source 1..38: mol_type = other DNA
gccaatactccactgtgcttgattttacttttgaatga

SEQ ID NO: 266 - DNA, 35 bp, synthetic construct
  misc_feature 1..35: note = Synthetic oligonucleotide
  source 1..35: mol_type = other DNA
tgacctactaagtcagcgcacatcctgggctttct

SEQ ID NO: 267 - DNA, 35 bp, synthetic construct
  misc_feature 1..35: note = Synthetic oligonucleotide
  source 1..35: mol_type = other DNA
tgtctctactgtgcccaattgttcggaaataactt

SEQ ID NO: 268 - DNA, 35 bp, synthetic construct
  misc_feature 1..35: note = Synthetic oligonucleotide
  source 1..35: mol_type = other DNA
aacctctgctgtgcgttaaactctaccgtgcctac

SEQ ID NO: 269 - DNA, 36 bp, synthetic construct
  misc_feature 1..36: note = Synthetic oligonucleotide
  source 1..36: mol_type = other DNA
tacaacgcgtgcttggggtgacgtggtgcctcttta

SEQ ID NO: 270 - DNA, 36 bp, synthetic construct
  misc_feature 1..36: note = Synthetic oligonucleotide
  source 1..36: mol_type = other DNA
tagtcttgccgtctatctctaccgtgcctggcccta

SEQ ID NO: 271 - DNA, 35 bp, synthetic construct
  misc_feature 1..35: note = Synthetic oligonucleotide
  source 1..35: mol_type = other DNA
gcggaactcgcccccttacatcattttttttggtt

SEQ ID NO: 272 - DNA, 35 bp, synthetic construct
  misc_feature 1..35: note = Synthetic oligonucleotide
  source 1..35: mol_type = other DNA
tgcgtgctaaacggtctagcacatgcgggcctcac

SEQ ID NO: 273 - DNA, 38 bp, synthetic construct
  misc_feature 1..38: note = Synthetic oligonucleotide
  source 1..38: mol_type = other DNA
gctgcagtgcgactctggcctccactgtgctaccttga

SEQ ID NO: 274 - DNA, 35 bp, synthetic construct
  misc_feature 1..35: note = Synthetic oligonucleotide
  source 1..35: mol_type = other DNA
ggccacgactggttccccaattcacaggtatacat

SEQ ID NO: 275 - DNA, 35 bp, synthetic construct
  misc_feature 1..35: note = Synthetic oligonucleotide
  source 1..35: mol_type = other DNA
gcgatagccttaacttgccttctgtgaactcgcct

SEQ ID NO: 276 - DNA, 35 bp, synthetic construct
  misc_feature 1..35: note = Synthetic oligonucleotide
  source 1..35: mol_type = other DNA
tcacctactaggtccatccaatacttattgtccca

SEQ ID NO: 277 - DNA, 35 bp, synthetic construct
  misc_feature 1..35: note = Synthetic oligonucleotide
  source 1..35: mol_type = other DNA
catgcggcaagcttttaactcagctttatctcata

SEQ ID NO: 278 - DNA, 38 bp, synthetic construct
  misc_feature 1..38: note = Synthetic oligonucleotide
  source 1..38: mol_type = other DNA
catgacattttctccactgtgcttgtaattagtattga

SEQ ID NO: 279 - DNA, 36 bp, synthetic construct
  misc_feature 1..36: note = Synthetic oligonucleotide
  source 1..36: mol_type = other DNA
aactccaccgtgcccacttcttgtttcatagtttaa

SEQ ID NO: 280 - DNA, 38 bp, synthetic construct
  misc_feature 1..38: note = Synthetic oligonucleotide
  source 1..38: mol_type = other DNA
ccatgcgattttgtttcccctctactgtgcttatctga

SEQ ID NO: 281 - DNA, 35 bp, synthetic construct
  misc_feature 1..35: note = Synthetic oligonucleotide
  source 1..35: mol_type = other DNA
tgttcacctgtccttcctctctactgtgccgttct

SEQ ID NO: 282 - DNA, 35 bp, synthetic construct
  misc_feature 1..35: note = Synthetic oligonucleotide
  source 1..35: mol_type = other DNA
atgcgcgcgatcgaggtccccgatggcttcgctcc

SEQ ID NO: 283 - DNA, 36 bp, synthetic construct
  misc_feature 1..36: note = Synthetic oligonucleotide
  source 1..36: mol_type = other DNA
tccgcgtgtaaccttggcatgtacctagtgtccaca

SEQ ID NO: 284 - DNA, 36 bp, synthetic construct
  misc_feature 1..36: note = Synthetic oligonucleotide
  source 1..36: mol_type = other DNA
catgccaagctttcatttaggatttcgcccacatca

SEQ ID NO: 285 - DNA, 37 bp, synthetic construct
  misc_feature 1..37: note = Synthetic oligonucleotide
  source 1..37: mol_type = other DNA
gcgtctgcgtcctagttttctctaccgtgcttttcga

SEQ ID NO: 286 - DNA, 36 bp, synthetic construct
  misc_feature 1..36: note = Synthetic oligonucleotide
  source 1..36: mol_type = other DNA
ggctgctagacctccaccgtgccctttctttggtta

SEQ ID NO: 287 - DNA, 35 bp, synthetic construct
  misc_feature 1..35: note = Synthetic oligonucleotide
  source 1..35: mol_type = other DNA
gagtcaggcccaggcttacatatcactagctttta

SEQ ID NO: 288 - DNA, 36 bp, synthetic construct
  misc_feature 1..36: note = Synthetic oligonucleotide
  source 1..36: mol_type = other DNA
aatactctactgtgccccccgttttctcatcgatca

SEQ ID NO: 289 - DNA, 35 bp, synthetic construct
  misc_feature 1..35: note = Synthetic oligonucleotide
  source 1..35: mol_type = other DNA
aggcatgcgcagagttaatttttttctctactgtg

SEQ ID NO: 290 - DNA, 36 bp, synthetic construct
  misc_feature 1..36: note = Synthetic oligonucleotide
  source 1..36: mol_type = other DNA
gacctgcagcgcacgcccgatatctctactgtgcca

SEQ ID NO: 291 - DNA, 36 bp, synthetic construct
  misc_feature 1..36: note = Synthetic oligonucleotide
  source 1..36: mol_type = other DNA
ccggggctaggaaagctaccacgtcatgcggaacta

SEQ ID NO: 292 - DNA, 35 bp, synthetic construct
  misc_feature 1..35: note = Synthetic oligonucleotide
  source 1..35: mol_type = other DNA
catctcaaaactttcctctaccgtgcaaacattta

SEQ ID NO: 293 - DNA, 35 bp, synthetic construct
  misc_feature 1..35: note = Synthetic oligonucleotide
  source 1..35: mol_type = other DNA
gcgatcgaacttgcctcctacaatcatcaactagc

SEQ ID NO: 294 - DNA, 38 bp, synthetic construct
  misc_feature 1..38: note = Synthetic oligonucleotide
  source 1..38: mol_type = other DNA
cagtcatcccgtggactctgtgctcgtatctccattga

SEQ ID NO: 295 - DNA, 36 bp, synthetic construct
  misc_feature 1..36: note = Synthetic oligonucleotide
  source 1..36: mol_type = other DNA
tcgtagtacgcggtgaaccctcaatttacgccccta

SEQ ID NO: 296 - DNA, 37 bp, synthetic construct
  misc_feature 1..37: note = Synthetic oligonucleotide
  source 1..37: mol_type = other DNA
gcgtcgtccaactccactgtgcccattttaggtctga

SEQ ID NO: 297 - DNA, 35 bp, synthetic construct
  misc_feature 1..35: note = Synthetic oligonucleotide
  source 1..35: mol_type = other DNA
gcatatgcggtgtttctactctaccgtgcaaaacc

SEQ ID NO: 298 - DNA, 36 bp, synthetic construct
  misc_feature 1..36: note = Synthetic oligonucleotide
  source 1..36: mol_type = other DNA
gcggcaacacttcctctactgtgcttcctggcttaa

SEQ ID NO: 299 - DNA, 35 bp, synthetic construct
  misc_feature 1..35: note = Synthetic oligonucleotide
  source 1..35: mol_type = other DNA
gattcggtccccttcttctctactgtgccttttct

SEQ ID NO: 300 - DNA, 35 bp, synthetic construct
  misc_feature 1..35: note = Synthetic oligonucleotide
  source 1..35: mol_type = other DNA
ccgcgtgcttggtgcgtgctgcaggaaattggaaa

SEQ ID NO: 301 - DNA, 36 bp, synthetic construct
  misc_feature 1..36: note = Synthetic oligonucleotide
  source 1..36: mol_type = other DNA
gcgtgccaacggactggagctctattgattgttcta

SEQ ID NO: 302 - DNA, 35 bp, synthetic construct
  misc_feature 1..35: note = Synthetic oligonucleotide
  source 1..35: mol_type = other DNA
atgtacgtgcgtaccttttatattctctactgtgc

SEQ ID NO: 303 - DNA, 36 bp, synthetic construct
  misc_feature 1..36: note = Synthetic oligonucleotide
  source 1..36: mol_type = other DNA
agagcctgggcttgctagctggatttggtcacgaaa

SEQ ID NO: 304 - DNA, 35 bp, synthetic construct
  misc_feature 1..35: note = Synthetic oligonucleotide
  source 1..35: mol_type = other DNA
tactgcgcgcctggacccgtgtgctagacatgcgc

SEQ ID NO: 305 - DNA, 36 bp, synthetic construct
  misc_feature 1..36: note = Synthetic oligonucleotide
  source 1..36: mol_type = other DNA
ccgtggtgccctgcgcgctaagaggctcacggagta

SEQ ID NO: 306 - DNA, 35 bp, synthetic construct
  misc_feature 1..35: note = Synthetic oligonucleotide
  source 1..35: mol_type = other DNA
gtaccggacctagggactaacgtactggcacctct

SEQ ID NO: 307 - DNA, 36 bp, synthetic construct
  misc_feature 1..36: note = Synthetic oligonucleotide
  source 1..36: mol_type = other DNA
taccgcgagcttgggaagtgctgctacgtctgccga

SEQ ID NO: 308 - DNA, 35 bp, synthetic construct
  misc_feature 1..35: note = Synthetic oligonucleotide
  source 1..35: mol_type = other DNA
ggtatgcccgcttttactctactgtgcccgacata

SEQ ID NO: 309 - DNA, 36 bp, synthetic construct
  misc_feature 1..36: note = Synthetic oligonucleotide
  source 1..36: mol_type = other DNA
gtgcaacactaagttgaccggattgagtctagcgaa

SEQ ID NO: 310 - DNA, 35 bp, synthetic construct
  misc_feature 1..35: note = Synthetic oligonucleotide
  source 1..35: mol_type = other DNA
gactgcagggtgtcacctctaccgtgccatgaggt

SEQ ID NO: 311 - DNA, 35 bp, synthetic construct
  misc_feature 1..35: note = Synthetic oligonucleotide
  source 1..35: mol_type = other DNA
ttcgtagtaccaatagtcagtaatgccctttcgcc

SEQ ID NO: 312 - DNA, 38 bp, synthetic construct
  misc_feature 1..38: note = Synthetic oligonucleotide
  source 1..38: mol_type = other DNA
atgcactgtatgcgggctatgcgaatacctagttatga

SEQ ID NO: 313 - DNA, 36 bp, synthetic construct
  misc_feature 1..36: note = Synthetic oligonucleotide
  source 1..36: mol_type = other DNA
cccggcgcgctacgggacgattatgagctcttgcaa

SEQ ID NO: 314 - DNA, 35 bp, synthetic construct
  misc_feature 1..35: note = Synthetic oligonucleotide
  source 1..35: mol_type = other DNA
catgcgcacaggctttttaatctccatgaagtttc

SEQ ID NO: 315 - DNA, 38 bp, synthetic construct
  misc_feature 1..38: note = Synthetic oligonucleotide
  source 1..38: mol_type = other DNA
gcgggcttacacgtactggaggggttgcatgccattga

SEQ ID NO: 316 - DNA, 35 bp, synthetic construct
  misc_feature 1..35: note = Synthetic oligonucleotide
  source 1..35: mol_type = other DNA
gtcgtagtactcgcggtcaagagattccttatttc

SEQ ID NO: 317 - DNA, 35 bp, synthetic construct
  misc_feature 1..35: note = Synthetic oligonucleotide
  source 1..35: mol_type = other DNA
cacgcgtgcttggcgacgttcacttgcgggcctat

SEQ ID NO: 318 - DNA, 36 bp, synthetic construct
  misc_feature 1..36: note = Synthetic oligonucleotide
  source 1..36: mol_type = other DNA
gccacctcactccactgtgctatcttatcgccttca

SEQ ID NO: 319 - DNA, 36 bp, synthetic construct
  misc_feature 1..36: note = Synthetic oligonucleotide
  source 1..36: mol_type = other DNA
cgtgtcctttgaccgtactgcgaaacgcctaccaaa

SEQ ID NO: 320 - DNA, 35 bp, synthetic construct
  misc_feature 1..35: note = Synthetic oligonucleotide
  source 1..35: mol_type = other DNA
gaatcgtaacaaactgcaggcctatctctacttgt

SEQ ID NO: 321 - DNA, 37 bp, synthetic construct
  misc_feature 1..37: note = Synthetic oligonucleotide
  source 1..37: mol_type = other DNA
gcaggaaacctctactgtgccttgtagtatactttga

SEQ ID NO: 322 - DNA, 38 bp, synthetic construct
  misc_feature 1..38: note = Synthetic oligonucleotide
  source 1..38: mol_type = other DNA
gcagtccatagcgctcctggtctcctcttttgctttga

SEQ ID NO: 323 - DNA, 35 bp, synthetic construct
  misc_feature 1..35: note = Synthetic oligonucleotide
  source 1..35: mol_type = other DNA
cgtgccactcaaatcctcctctaccgtgctttttt

SEQ ID NO: 324 - DNA, 35 bp, synthetic construct
  misc_feature 1..35: note = Synthetic oligonucleotide
  source 1..35: mol_type = other DNA
tggagcacgccgccaatggacagtccaccttacct

SEQ ID NO: 325 - DNA, 35 bp, synthetic construct
  misc_feature 1..35: note = Synthetic oligonucleotide
  source 1..35: mol_type = other DNA
gatgggcctgcgtgctaaggcgcgataacgggtgt

SEQ ID NO: 326 - DNA, 35 bp, synthetic construct
  misc_feature 1..35: note = Synthetic oligonucleotide
  source 1..35: mol_type = other DNA
cgcgggccaggtctgcatgcatgcgaggtcacacc

SEQ ID NO: 327 - DNA, 37 bp, synthetic construct
  misc_feature 1..37: note = Synthetic oligonucleotide
  source 1..37: mol_type = other DNA
gcgtgcttacgaacaaggtgcgtgcccgattctccga

SEQ ID NO: 328 - DNA, 36 bp, synthetic construct
  misc_feature 1..36: note = Synthetic oligonucleotide
  source 1..36: mol_type = other DNA
tcagcggacctagcgaacgattgcggccaccactta

SEQ ID NO: 329 - DNA, 38 bp, synthetic construct
  misc_feature 1..38: note = Synthetic oligonucleotide
  source 1..38: mol_type = other DNA
gccgcgcgtgccagcataatcgtactatgtctgcgtga

SEQ ID NO: 330 - DNA, 35 bp, synthetic construct
  misc_feature 1..35: note = Synthetic oligonucleotide
  source 1..35: mol_type = other DNA
atcgtagaactagctagtctgcaatttctggttac

SEQ ID NO: 331 - DNA, 35 bp, synthetic construct
  misc_feature 1..35: note = Synthetic oligonucleotide
  source 1..35: mol_type = other DNA
gccgcgtgcctggccaaactgggtcaacttttctc

SEQ ID NO: 332 - DNA, 38 bp, synthetic construct
  misc_feature 1..38: note = Synthetic oligonucleotide
  source 1..38: mol_type = other DNA
tctatcgcgtgccagtgtacgtacggtgtcttatttga

SEQ ID NO: 333 - DNA, 35 bp, synthetic construct
  misc_feature 1..35: note = Synthetic oligonucleotide
  source 1..35: mol_type = other DNA
ttacgttcccggactctactgtgcccctccctata

SEQ ID NO: 334 - DNA, 35 bp, synthetic construct
  misc_feature 1..35: note = Synthetic oligonucleotide
  source 1..35: mol_type = other DNA
ccaaccgcgcgcctggggactacgtgacatctagc

SEQ ID NO: 335 - DNA, 36 bp, synthetic construct
  misc_feature 1..36: note = Synthetic oligonucleotide
  source 1..36: mol_type = other DNA
tcgtagtactgctgctttgtgcgtccatactcgtta

SEQ ID NO: 336 - DNA, 37 bp, synthetic construct
  misc_feature 1..37: note = Synthetic oligonucleotide
  source 1..37: mol_type = other DNA
atcgtagtactgcaactgggattattcacacactaga

SEQ ID NO: 337 - DNA, 36 bp, synthetic construct
  misc_feature 1..36: note = Synthetic oligonucleotide
  source 1..36: mol_type = other DNA
gaattccgcgcgtagtcgagtactagggaaatcgaa

SEQ ID NO: 338 - DNA, 35 bp, synthetic construct
  misc_feature 1..35: note = Synthetic oligonucleotide
  source 1..35: mol_type = other DNA
catgcggaccatgatttttattgagtttttgcttt

SEQ ID NO: 339 - DNA, 35 bp, synthetic construct
  misc_feature 1..35: note = Synthetic oligonucleotide
  source 1..35: mol_type = other DNA
attcgagcggtcttgcgggtatccctccactgtgc

SEQ ID NO: 340 - DNA, 36 bp, synthetic construct
  misc_feature 1..36: note = Synthetic oligonucleotide
  source 1..36: mol_type = other DNA
catgcgcattactctggtcaacttgccgaatcgaaa

SEQ ID NO: 341 - DNA, 37 bp, synthetic construct
  misc_feature 1..37: note = Synthetic oligonucleotide
  source 1..37: mol_type = other DNA
gggcgtatcgtagccacgtacaagggttgcatattga

SEQ ID NO: 342 - DNA, 36 bp, synthetic construct
  misc_feature 1..36: note = Synthetic oligonucleotide
  source 1..36: mol_type = other DNA
gcgagaagctttcaatcctcaaccttacgctttata

SEQ ID NO: 343 - DNA, 35 bp, synthetic construct
  misc_feature 1..35: note = Synthetic oligonucleotide
  source 1..35: mol_type = other DNA
acgcctaagttgcctctaccgtgccgagccctcca

SEQ ID NO: 344 - DNA, 35 bp, synthetic construct
  misc_feature 1..35: note = Synthetic oligonucleotide
  source 1..35: mol_type = other DNA
tgcggagctagcaacgagggtagagtgcgaattcc

SEQ ID NO: 345 - DNA, 35 bp, synthetic construct
  misc_feature 1..35: note = Synthetic oligonucleotide
  source 1..35: mol_type = other DNA
gataagtcacggacggtttctctactgtgcctttt

SEQ ID NO: 346 - DNA, 36 bp, synthetic construct
  misc_feature 1..36: note = Synthetic oligonucleotide
  source 1..36: mol_type = other DNA
gcgtgccaacaacctgcggacaaaagaccccctaaa

SEQ ID NO: 347 - DNA, 38 bp, synthetic construct
  misc_feature 1..38: note = Synthetic oligonucleotide
  source 1..38: mol_type = other DNA
ggtcatgccgctaggggcgaactcctctgagcctgtga

SEQ ID NO: 348 - DNA, 38 bp, synthetic construct
  misc_feature 1..38: note = Synthetic oligonucleotide
  source 1..38: mol_type = other DNA
cctcgcgcgccagggacgttgcaagttaaaccatatga

SEQ ID NO: 349 - DNA, 35 bp, synthetic construct
  misc_feature 1..35: note = Synthetic oligonucleotide
  source 1..35: mol_type = other DNA
gcaggcgggccaggcttaatacacgcttctactta

SEQ ID NO: 350 - DNA, 34 bp, synthetic construct
  misc_feature 1..34: note = Synthetic oligonucleotide
  source 1..34: mol_type = other DNA
atcgtagtaatgcagcaattgcaatactcctatt

SEQ ID NO: 351 - DNA, 36 bp, synthetic construct
  misc_feature 1..36: note = Synthetic oligonucleotide
  source 1..36: mol_type = other DNA
accgaacctagggacgccccaggaatcacaatgtta

SEQ ID NO: 352 - DNA, 35 bp, synthetic construct
  misc_feature 1..35: note = Synthetic oligonucleotide
  source 1..35: mol_type = other DNA
tactgctaactttcactctaccgtgcaaaccacca

SEQ ID NO: 353 - DNA, 35 bp, synthetic construct
  misc_feature 1..35: note = Synthetic oligonucleotide
  source 1..35: mol_type = other DNA
cccggaagtgggttcgagctgcatcgtgtcaggcc

SEQ ID NO: 354 - DNA, 36 bp, synthetic construct
  misc_feature 1..36: note = Synthetic oligonucleotide
  source 1..36: mol_type = other DNA
tagtaacttcatgcccccagtggaactcctctgaca

SEQ ID NO: 355 - DNA, 35 bp, synthetic construct
  misc_feature 1..35: note = Synthetic oligonucleotide
  source 1..35: mol_type = other DNA
gtccacgcgtgcctgaggacacagccaggaaactt

SEQ ID NO: 356 - DNA, 36 bp, synthetic construct
  misc_feature 1..36: note = Synthetic oligonucleotide
  source 1..36: mol_type = other DNA
aatcgctggccagaaagttagcagtcgaggcccaaa

SEQ ID NO: 357 - DNA, 36 bp, synthetic construct
  misc_feature 1..36: note = Synthetic oligonucleotide
  source 1..36: mol_type = other DNA
agggcgtgccacctcgaacacgcaggtaatttttca

SEQ ID NO: 358 - DNA, 35 bp, synthetic construct
  misc_feature 1..35: note = Synthetic oligonucleotide
  source 1..35: mol_type = other DNA
tcacctaccatgtccgagtaacactcgcccctcca

SEQ ID NO: 359 - DNA, 35 bp, synthetic construct
  misc_feature 1..35: note = Synthetic oligonucleotide
  source 1..35: mol_type = other DNA
cgtggccggtggtccgtactgccaaaatatttaca

SEQ ID NO: 360 - DNA, 35 bp, synthetic construct
  misc_feature 1..35: note = Synthetic oligonucleotide
  source 1..35: mol_type = other DNA
cgcgtgccagcggactttcaccatgcgatacgtgg

SEQ ID NO: 361 - DNA, 36 bp, synthetic construct
  misc_feature 1..36: note = Synthetic oligonucleotide
  source 1..36: mol_type = other DNA
gagttaaagctatctctaccgtgccccctaaagtta

SEQ ID NO: 362 - DNA, 36 bp, synthetic construct
  misc_feature 1..36: note = Synthetic oligonucleotide
  source 1..36: mol_type = other DNA
tatcgcgcgccagaagagtaagcaagtcatgaccca

SEQ ID NO: 363 - DNA, 37 bp, synthetic construct
  misc_feature 1..37: note = Synthetic oligonucleotide
  source 1..37: mol_type = other DNA
tgaccaagggttccgctgtggggatacggttaaggga

SEQ ID NO: 364 - DNA, 36 bp, synthetic construct
  misc_feature 1..36: note = Synthetic oligonucleotide
  source 1..36: mol_type = other DNA
agccggagctaggctagtgcgcaccagtcaaaccta

SEQ ID NO: 365 - DNA, 38 bp, synthetic construct
  misc_feature 1..38: note = Synthetic oligonucleotide
  source 1..38: mol_type = other DNA
tcgtagtattgcaagggcaccttactcccaccatttga

SEQ ID NO: 366 - DNA, 35 bp, synthetic construct
  misc_feature 1..35: note = Synthetic oligonucleotide
  source 1..35: mol_type = other DNA
gcgcagcttatcgccatccgcaaatccacacgctt

SEQ ID NO: 367 - DNA, 37 bp, synthetic construct
  misc_feature 1..37: note = Synthetic oligonucleotide
  source 1..37: mol_type = other DNA
cccacgcgtgcctgtggatggcgcactcgggcataga

SEQ ID NO: 368 - DNA, 36 bp, synthetic construct
  misc_feature 1..36: note = Synthetic oligonucleotide
  source 1..36: mol_type = other DNA
caaggagcacgtatgcactgtgcgagttggtccgta

SEQ ID NO: 369 - DNA, 36 bp, synthetic construct
  misc_feature 1..36: note = Synthetic oligonucleotide
  source 1..36: mol_type = other DNA
agttagtctctaccgtgcccattattccgttctgaa

SEQ ID NO: 370 - DNA, 35 bp, synthetic construct
  misc_feature 1..35: note = Synthetic oligonucleotide
  source 1..35: mol_type = other DNA
gcctgtgaaccttaaactctaccgtgcctctttgt

SEQ ID NO: 371 - DNA, 36 bp, synthetic construct
  misc_feature 1..36: note = Synthetic oligonucleotide
  source 1..36: mol_type = other DNA
gctaaccaagtcatgggaccacgctctattgggata

SEQ ID NO: 372 - DNA, 35 bp, synthetic construct
  misc_feature 1..35: note = Synthetic oligonucleotide
  source 1..35: mol_type = other DNA
gcaggcattattagtgtctctaccgtgctctggac

SEQ ID NO: 373 - DNA, 38 bp, synthetic construct
  misc_feature 1..38: note = Synthetic oligonucleotide
  source 1..38: mol_type = other DNA
taccgcgcgcctggtagttgcagtattcctttgtttga

SEQ ID NO: 374 - DNA, 35 bp, synthetic construct
  misc_feature 1..35: note = Synthetic oligonucleotide
  source 1..35: mol_type = other DNA
taacctaccaggccatgcgcaggactgtaatgcca

SEQ ID NO: 375 - DNA, 36 bp, synthetic construct
  misc_feature 1..36: note = Synthetic oligonucleotide
  source 1..36: mol_type = other DNA
gcgccacatcgcaagcttatcgacaccccgctttca

SEQ ID NO: 376 - DNA, 35 bp, synthetic construct
  misc_feature 1..35: note = Synthetic oligonucleotide
  source 1..35: mol_type = other DNA
cccggggctagggatcgggtgcaatcattgaattt

SEQ ID NO: 377 - DNA, 35 bp, synthetic construct
  misc_feature 1..35: note = Synthetic oligonucleotide
  source 1..35: mol_type = other DNA
gcgagcctagcccgtaactggaaggccactactct

SEQ ID NO: 378 - DNA, 37 bp, synthetic construct
  misc_feature 1..37: note = Synthetic oligonucleotide
  source 1..37: mol_type = other DNA
gacgggtgcgggctagcaagctttacctctattatga

SEQ ID NO: 379 - DNA, 35 bp, synthetic construct
  misc_feature 1..35: note = Synthetic oligonucleotide
  source 1..35: mol_type = other DNA
gcgtgccaacgtgactgtgtcgcctttgctctgta

SEQ ID NO: 380 - DNA, 35 bp, synthetic construct
  misc_feature 1..35: note = Synthetic oligonucleotide
  source 1..35: mol_type = other DNA
atcgtaggactgcgaaatcattgcgggtttattgt

SEQ ID NO: 381 - DNA, 35 bp, synthetic construct
  misc_feature 1..35: note = Synthetic oligonucleotide
  source 1..35: mol_type = other DNA
ttacctaccaaggcacgccgttttatataaggtgg

SEQ ID NO: 382 - DNA, 35 bp, synthetic construct
  misc_feature 1..35: note = Synthetic oligonucleotide
  source 1..35: mol_type = other DNA
ccgcgtgcttggattgtgcagtcctccctctgact

SEQ ID NO: 383 - DNA, 36 bp, synthetic construct
  misc_feature 1..36: note = Synthetic oligonucleotide
  source 1..36: mol_type = other DNA
ttacctaccagtgcatggcgataagtctttcctata

SEQ ID NO: 384 - DNA, 35 bp, synthetic construct
  misc_feature 1..35: note = Synthetic oligonucleotide
  source 1..35: mol_type = other DNA
gacgtctgcaggtgagcattggtctacttattggt

SEQ ID NO: 385 - DNA, 38 bp, synthetic construct
  misc_feature 1..38: note = Synthetic oligonucleotide
  source 1..38: mol_type = other DNA
cgcgatcgtagcagtacggaggttcttctagcatatga

SEQ ID NO: 386 - DNA, 35 bp, synthetic construct
  misc_feature 1..35: note = Synthetic oligonucleotide
  source 1..35: mol_type = other DNA
cgcgaatcgtagccgacgtgcttgggcttgcgacc

SEQ ID NO: 387 - DNA, 36 bp, synthetic construct
  misc_feature 1..36: note = Synthetic oligonucleotide
  source 1..36: mol_type = other DNA
aagcacggtacgcacagtccgacttttgccttcaaa

SEQ ID NO: 388 - DNA, 35 bp, synthetic construct
  misc_feature 1..35: note = Synthetic oligonucleotide
  source 1..35: mol_type = other DNA
tccggaactaggagacgtacacgccgcaatgcccc

SEQ ID NO: 389 - DNA, 35 bp, synthetic construct
  misc_feature 1..35: note = Synthetic oligonucleotide
  source 1..35: mol_type = other DNA
ccgcggacctagcgaggacagcgcattgctagcta

SEQ ID NO: 390 - DNA, 35 bp, synthetic construct
  misc_feature 1..35: note = Synthetic oligonucleotide
  source 1..35: mol_type = other DNA
agcccgcgtgcctgggagacgacctccgacttgcg

SEQ ID NO: 391 - DNA, 35 bp, synthetic construct
  misc_feature 1..35: note = Synthetic oligonucleotide
  source 1..35: mol_type = other DNA
gcgtgctaaggtactgtacagtctacgcctatgtt

SEQ ID NO: 392 - DNA, 38 bp, synthetic construct
  misc_feature 1..38: note = Synthetic oligonucleotide
  source 1..38: mol_type = other DNA
taccgcgatactgcacgtgtgcgaccgcttttccttga

SEQ ID NO: 393 - DNA, 36 bp, synthetic construct
  misc_feature 1..36: note = Synthetic oligonucleotide
  source 1..36: mol_type = other DNA
tgacctaccaaggagagtttcatttgatctaaacta

SEQ ID NO: 394 - DNA, 35 bp, synthetic construct
  misc_feature 1..35: note = Synthetic oligonucleotide
  source 1..35: mol_type = other DNA
cttagtgccctaagtctgcgtgactctactgtgcc

SEQ ID NO: 395 - DNA, 36 bp, synthetic construct
  misc_feature 1..36: note = Synthetic oligonucleotide
  source 1..36: mol_type = other DNA
tgcaggcagagcccgttaagctttttatcaactcca

SEQ ID NO: 396 - DNA, 35 bp, synthetic construct
  misc_feature 1..35: note = Synthetic oligonucleotide
  source 1..35: mol_type = other DNA
gaggcgaatcgtagctccacgtggtgccatgcaga

SEQ ID NO: 397 - DNA, 35 bp, synthetic construct
  misc_feature 1..35: note = Synthetic oligonucleotide
  source 1..35: mol_type = other DNA
catccgctagttgcttttaatgaccaccgcttcca

SEQ ID NO: 398 - DNA, 36 bp, synthetic construct
  misc_feature 1..36: note = Synthetic oligonucleotide
  source 1..36: mol_type = other DNA
aagcactgtacaaactggatgcgtacacttcctcca

SEQ ID NO: 399 - DNA, 35 bp, synthetic construct
  misc_feature 1..35: note = Synthetic oligonucleotide
  source 1..35: mol_type = other DNA
gcgtgccaaggtacggaaggtccatgcaacggttt

SEQ ID NO: 400 - DNA, 36 bp, synthetic construct
  misc_feature 1..36: note = Synthetic oligonucleotide
  source 1..36: mol_type = other DNA
cgtgtaccgcttgtaccgtacaaagtcaccttgtta

SEQ ID NO: 401 - DNA, 36 bp, synthetic construct
  misc_feature 1..36: note = Synthetic oligonucleotide
  source 1..36: mol_type = other DNA
catgcgcgctccactggtcttaattttcctccatga

SEQ ID NO: 402 - DNA, 37 bp, synthetic construct
  misc_feature 1..37: note = Synthetic oligonucleotide
  source 1..37: mol_type = other DNA
tctgcgtgctaagagcggccctgtagttgcgccttga

SEQ ID NO: 403 - DNA, 36 bp, synthetic construct
  misc_feature 1..36: note = Synthetic oligonucleotide
  source 1..36: mol_type = other DNA
gcgtgccaacgattctgcgctgggctagtaccatta

SEQ ID NO: 404 - DNA, 35 bp, synthetic construct
  misc_feature 1..35: note = Synthetic oligonucleotide
  source 1..35: mol_type = other DNA
gcgcgctaacggacaaatcccctaacctcgataaa

SEQ ID NO: 405 - DNA, 35 bp, synthetic construct
  misc_feature 1..35: note = Synthetic oligonucleotide
  source 1..35: mol_type = other DNA
attctctaccgtgccacattttatcctctgcaaac

SEQ ID NO: 406 - DNA, 37 bp, synthetic construct
  misc_feature 1..37: note = Synthetic oligonucleotide
  source 1..37: mol_type = other DNA
tgtctggatgccatgcgccacgcttttctcactatga

SEQ ID NO: 407 - DNA, 37 bp, synthetic construct
  misc_feature 1..37: note = Synthetic oligonucleotide
  source 1..37: mol_type = other DNA
atcgtagtgctgcaggatctacctacattattctgga

SEQ ID NO: 408 - DNA, 36 bp, synthetic construct
  misc_feature 1..36: note = Synthetic oligonucleotide
  source 1..36: mol_type = other DNA
gcagtctcatctgtcttctctaccgtgctcgaatca

SEQ ID NO: 409 - DNA, 35 bp, synthetic construct
  misc_feature 1..35: note = Synthetic oligonucleotide
  source 1..35: mol_type = other DNA
gtctccggcgatatctccactgtgcccttctctat

SEQ ID NO: 410 - DNA, 35 bp, synthetic construct
  misc_feature 1..35: note = Synthetic oligonucleotide
  source 1..35: mol_type = other DNA
gcaagtcattccagtcctgactctaccgtgcttac

SEQ ID NO: 411 - DNA, 35 bp, synthetic construct
  misc_feature 1..35: note = Synthetic oligonucleotide
  source 1..35: mol_type = other DNA
gtgatggtcgtgcccgctttatcttacatctgctt

SEQ ID NO: 412 - DNA, 35 bp, synthetic construct
  misc_feature 1..35: note = Synthetic oligonucleotide
  source 1..35: mol_type = other DNA
gcgtcgacgagatttttgacctctaccgtgccgac

SEQ ID NO: 413 - DNA, 35 bp, synthetic construct
  misc_feature 1..35: note = Synthetic oligonucleotide
  source 1..35: mol_type = other DNA
tgcgtcaggcgtccgcttttaccccaccatgcttt

SEQ ID NO: 414 - DNA, 37 bp, synthetic construct
  misc_feature 1..37: note = Synthetic oligonucleotide
  source 1..37: mol_type = other DNA
atgacacgcgcgcctgctagtactgcgctccatgcga

SEQ ID NO: 415 - DNA, 36 bp, synthetic construct
  misc_feature 1..36: note = Synthetic oligonucleotide
  source 1..36: mol_type = other DNA
ggtcaagcattgcgactctaccgtgcctcaaactaa

SEQ ID NO: 416 - DNA, 35 bp, synthetic construct
  misc_feature 1..35: note = Synthetic oligonucleotide
  source 1..35: mol_type = other DNA
cacgtactgtttactctaccgtgcattaaacgttt

SEQ ID NO: 417 - DNA, 35 bp, synthetic construct
  misc_feature 1..35: note = Synthetic oligonucleotide
  source 1..35: mol_type = other DNA
agcaggcccttttcacatactctctactgtgctcc

SEQ ID NO: 418 - DNA, 35 bp, synthetic construct
  misc_feature 1..35: note = Synthetic oligonucleotide
  source 1..35: mol_type = other DNA
taatgcaggagtgtgccaagcttttatttcatgtc

SEQ ID NO: 419 - DNA, 38 bp, synthetic construct
  misc_feature 1..38: note = Synthetic oligonucleotide
  source 1..38: mol_type = other DNA
catgcgaccgctttacctacataggattactcttctga

SEQ ID NO: 420 - DNA, 35 bp, synthetic construct
  misc_feature 1..35: note = Synthetic oligonucleotide
  source 1..35: mol_type = other DNA
ttgcggatctagcaacgaatggaaggaacacgtac

SEQ ID NO: 421 - DNA, 35 bp, synthetic construct
  misc_feature 1..35: note = Synthetic oligonucleotide
  source 1..35: mol_type = other DNA
atcgtagtacccgcgggaaaaaaccacttatcatc

SEQ ID NO: 422 - DNA, 35 bp, synthetic construct
  misc_feature 1..35: note = Synthetic oligonucleotide
  source 1..35: mol_type = other DNA
tcgctgcaccgtgtccatgcggctacaccaattcg

SEQ ID NO: 423 - DNA, 35 bp, synthetic construct
  misc_feature 1..35: note = Synthetic oligonucleotide
  source 1..35: mol_type = other DNA
gcagaataccttactctaccgtgccattaatacat

SEQ ID NO: 424 - DNA, 38 bp, synthetic construct
  misc_feature 1..38: note = Synthetic oligonucleotide
  source 1..38: mol_type = other DNA
gcgccgaatagcctctactgtgcgttaccctggattga

SEQ ID NO: 425 - DNA, 35 bp, synthetic construct
  misc_feature 1..35: note = Synthetic oligonucleotide
  source 1..35: mol_type = other DNA
gcaggccgtatcactctaccgtgcaaaaagtatac

SEQ ID NO: 426 - DNA, 37 bp, synthetic construct
  misc_feature 1..37: note = Synthetic oligonucleotide
  source 1..37: mol_type = other DNA
tactgaggcgacaattctctaccgtgcccccatttga

SEQ ID NO: 427 - DNA, 37 bp, synthetic construct
  misc_feature 1..37: note = Synthetic oligonucleotide
  source 1..37: mol_type = other DNA
gccactagtatcctccactgtgcaaaattacaataga

SEQ ID NO: 428 - DNA, 38 bp, synthetic construct
  misc_feature 1..38: note = Synthetic oligonucleotide
  source 1..38: mol_type = other DNA
ggtattgccgtgtagttcgttctctactgtgcctttga

SEQ ID NO: 429 - DNA, 35 bp, synthetic construct
  misc_feature 1..35: note = Synthetic oligonucleotide
  source 1..35: mol_type = other DNA
cttgcgagattagctttatcacctgttttccgctt

SEQ ID NO: 430 - DNA, 35 bp, synthetic construct
  misc_feature 1..35: note = Synthetic oligonucleotide
  source 1..35: mol_type = other DNA
gcacctctactgtgcccacaacgaattggactcac

SEQ ID NO: 431 - DNA, 35 bp, synthetic construct
  misc_feature 1..35: note = Synthetic oligonucleotide
  source 1..35: mol_type = other DNA
ctccgcggtcatccactgctccattcaactcgcct

SEQ ID NO: 432 - DNA, 35 bp, synthetic construct
  misc_feature 1..35: note = Synthetic oligonucleotide
  source 1..35: mol_type = other DNA
aatctccaccgtgcactatcttgtctcaaagtttc

SEQ ID NO: 433 - DNA, 36 bp, synthetic construct
  misc_feature 1..36: note = Synthetic oligonucleotide
  source 1..36: mol_type = other DNA
gctagctgaattcaccatatctctactgtgcactaa

SEQ ID NO: 434 - DNA, 37 bp, synthetic construct
  misc_feature 1..37: note = Synthetic oligonucleotide
  source 1..37: mol_type = other DNA
ctgcgtgctaagacgtacggtgtcaacatctctccga

SEQ ID NO: 435 - DNA, 35 bp, synthetic construct
  misc_feature 1..35: note = Synthetic oligonucleotide
  source 1..35: mol_type = other DNA
gcgacgggacttagcttatattagatttcgcttct

SEQ ID NO: 436 - DNA, 36 bp, synthetic construct
  misc_feature 1..36: note = Synthetic oligonucleotide
  source 1..36: mol_type = other DNA
catgcggaagcttactcatttttattcgattaccaa

SEQ ID NO: 437 - DNA, 35 bp, synthetic construct
  misc_feature 1..35: note = Synthetic oligonucleotide
  source 1..35: mol_type = other DNA
taacctaccaagcaatcaccgttttggaaatcatt

SEQ ID NO: 438 - DNA, 36 bp, synthetic construct
  misc_feature 1..36: note = Synthetic oligonucleotide
  source 1..36: mol_type = other DNA
gcccagaaaaactctactgtgcgatgacctgttaaa

SEQ ID NO: 439 - DNA, 36 bp, synthetic construct
  misc_feature 1..36: note = Synthetic oligonucleotide
  source 1..36: mol_type = other DNA
tccgcgtgcctggaaaggtactgtccacttgaacaa

SEQ ID NO: 440 - DNA, 38 bp, synthetic construct
  misc_feature 1..38: note = Synthetic oligonucleotide
  source 1..38: mol_type = other DNA
gagtttgcaggcttggggactctactgtgcaattttga

SEQ ID NO: 441 - DNA, 36 bp, synthetic construct
  misc_feature 1..36: note = Synthetic oligonucleotide
  source 1..36: mol_type = other DNA
ttcgcctccaccgtgcatttctaactttatttctta

SEQ ID NO: 442 - DNA, 35 bp, synthetic construct
  misc_feature 1..35: note = Synthetic oligonucleotide
  source 1..35: mol_type = other DNA
ccctcggactgagcactgcatacaagaagccttgc

SEQ ID NO: 443 - DNA, 37 bp, synthetic construct
  misc_feature 1..37: note = Synthetic oligonucleotide
  source 1..37: mol_type = other DNA
cccgtgcctccccttatctctaccgtgcctcctatga

SEQ ID NO: 444 - DNA, 36 bp, synthetic construct
  misc_feature 1..36: note = Synthetic oligonucleotide
  source 1..36: mol_type = other DNA
actcagtcatcgtacgctttccgatatcgctttata

SEQ ID NO: 445 - DNA, 35 bp, synthetic construct
  misc_feature 1..35: note = Synthetic oligonucleotide
  source 1..35: mol_type = other DNA
tacgcgtgccaggaactgtaccagtcttatgccgc

SEQ ID NO: 446 - DNA, 36 bp, synthetic construct
  misc_feature 1..36: note = Synthetic oligonucleotide
  source 1..36: mol_type = other DNA
gcggatttggtctctaccgtgcctactactagttaa

SEQ ID NO: 447 - DNA, 38 bp, synthetic construct
  misc_feature 1..38: note = Synthetic oligonucleotide
  source 1..38: mol_type = other DNA
ggcacggaatgcatcgtgtcatggcgtctttcccctga

SEQ ID NO: 448 - DNA, 35 bp, synthetic construct
  misc_feature 1..35: note = Synthetic oligonucleotide
  source 1..35: mol_type = other DNA
gtgcaggccacccagatctctactgtgcctcttac

SEQ ID NO: 449 - DNA, 35 bp, synthetic construct
  misc_feature 1..35: note = Synthetic oligonucleotide
  source 1..35: mol_type = other DNA
atcgtaggactgcacatcgtagtttagttactcac

SEQ ID NO: 450 - DNA, 35 bp, synthetic construct
  misc_feature 1..35: note = Synthetic oligonucleotide
  source 1..35: mol_type = other DNA
tcacctacaaatgtcaggcatatactactctatta

SEQ ID NO: 451 - DNA, 36 bp, synthetic construct
  misc_feature 1..36: note = Synthetic oligonucleotide
  source 1..36: mol_type = other DNA
gtacaagcagtttggcgtatatctctactgtgctga

SEQ ID NO: 452 - DNA, 35 bp, synthetic construct
  misc_feature 1..35: note = Synthetic oligonucleotide
  source 1..35: mol_type = other DNA
gataacgtttgattactccactgtgccataccctt

SEQ ID NO: 453 - DNA, 37 bp, synthetic construct
  misc_feature 1..37: note = Synthetic oligonucleotide
  source 1..37: mol_type = other DNA
tgagcgatcgtagccaacgtactgcctttcctattga

SEQ ID NO: 454 - DNA, 35 bp, synthetic construct
  misc_feature 1..35: note = Synthetic oligonucleotide
  source 1..35: mol_type = other DNA
gcgtcgaccacgttaatatttaccctctactgtgc

SEQ ID NO: 455 - DNA, 35 bp, synthetic construct
  misc_feature 1..35: note = Synthetic oligonucleotide
  source 1..35: mol_type = other DNA
gcctggtcaactcgccgcaatacttttacccatcc

SEQ ID NO: 456 - DNA, 37 bp, synthetic construct
  misc_feature 1..37: note = Synthetic oligonucleotide
  source 1..37: mol_type = other DNA
gtcaccctaaccgtattctccaccgtgccttacttga

SEQ ID NO: 457 - DNA, 35 bp, synthetic construct
  misc_feature 1..35: note = Synthetic oligonucleotide
  source 1..35: mol_type = other DNA
gatagaattgagctctactgtgcctatctggttat

SEQ ID NO: 458 - DNA, 35 bp, synthetic construct
  misc_feature 1..35: note = Synthetic oligonucleotide
  source 1..35: mol_type = other DNA
gtccaaattagctctctactgtgcctatccgttaa

SEQ ID NO: 459 - DNA, 37 bp, synthetic construct
  misc_feature 1..37: note = Synthetic oligonucleotide
  source 1..37: mol_type = other DNA
gcgcacttgttcttcttggtcgcggcgtgccacgcga

SEQ ID NO: 460 - DNA, 36 bp, synthetic construct
  misc_feature 1..36: note = Synthetic oligonucleotide
  source 1..36: mol_type = other DNA
gcggtcagagctaattctgtcaactcgccctttcta

SEQ ID NO: 461 - DNA, 36 bp, synthetic construct
  misc_feature 1..36: note = Synthetic oligonucleotide
  source 1..36: mol_type = other DNA
gagcggaactagcgatgcgtacaaggttaatttcta

SEQ ID NO: 462 - DNA, 35 bp, synthetic construct
  misc_feature 1..35: note = Synthetic oligonucleotide
  source 1..35: mol_type = other DNA
aacactctactgtgcctccacgatattttcatact

SEQ ID NO: 463 - DNA, 35 bp, synthetic construct
  misc_feature 1..35: note = Synthetic oligonucleotide
  source 1..35: mol_type = other DNA
gtagtgatgccacctcaactgtgcccttgttttct

SEQ ID NO: 464 - DNA, 36 bp, synthetic construct
  misc_feature 1..36: note = Synthetic oligonucleotide
  source 1..36: mol_type = other DNA
ttcctgcagttctattctctactgtgccctttgtta

SEQ ID NO: 465 - DNA, 37 bp, synthetic construct
  misc_feature 1..37: note = Synthetic oligonucleotide
  source 1..37: mol_type = other DNA
gactgctctcatagtatgaactccactgtgcccttga

SEQ ID NO: 466 - DNA, 38 bp, synthetic construct
  misc_feature 1..38: note = Synthetic oligonucleotide
  source 1..38: mol_type = other DNA
accatgcgcgcaaccttctctaccgtgcatctttttga

SEQ ID NO: 467 - DNA, 36 bp, synthetic construct
  misc_feature 1..36: note = Synthetic oligonucleotide
  source 1..36: mol_type = other DNA
gcgttatacctccactgtgctcaattttcatctaaa

SEQ ID NO: 468 - DNA, 38 bp, synthetic construct
  misc_feature 1..38: note = Synthetic oligonucleotide
  source 1..38: mol_type = other DNA
acgcgtgcctggtttactgcagacgagccccttcatga

SEQ ID NO: 469 - DNA, 38 bp, synthetic construct
  misc_feature 1..38: note = Synthetic oligonucleotide
  source 1..38: mol_type = other DNA
gcacacacactttactctaccgtgccattttgaagtga

SEQ ID NO: 470 - DNA, 38 bp, synthetic construct
  misc_feature 1..38: note = Synthetic oligonucleotide
  source 1..38: mol_type = other DNA
atctgcgggcatccatagataatactctactgtgctga

SEQ ID NO: 471 - DNA, 35 bp, synthetic construct
  misc_feature 1..35: note = Synthetic oligonucleotide
  source 1..35: mol_type = other DNA
aaatcattcctgtggtctctctaccgtgccaatat

SEQ ID NO: 472 - DNA, 36 bp, synthetic construct
  misc_feature 1..36: note = Synthetic oligonucleotide
  source 1..36: mol_type = other DNA
gccataacctatctctactgtgctaaaccggttaca

SEQ ID NO: 473 - DNA, 38 bp, synthetic construct
  misc_feature 1..38: note = Synthetic oligonucleotide
  source 1..38: mol_type = other DNA
gcgactctacggaaatttgggatctctaccgtgcctga

SEQ ID NO: 474 - DNA, 35 bp, synthetic construct
  misc_feature 1..35: note = Synthetic oligonucleotide
  source 1..35: mol_type = other DNA
acctctactgtgccgattccattgttcttccactc

SEQ ID NO: 475 - DNA, 35 bp, synthetic construct
  misc_feature 1..35: note = Synthetic oligonucleotide
  source 1..35: mol_type = other DNA
gcgaccaagccattccaaactagccctgatttcaa

SEQ ID NO: 476 - DNA, 36 bp, synthetic construct
  misc_feature 1..36: note = Synthetic oligonucleotide
  source 1..36: mol_type = other DNA
ctgtacggctgtctgggcctagtattcccgctttaa

SEQ ID NO: 477 - DNA, 36 bp, synthetic construct
  misc_feature 1..36: note = Synthetic oligonucleotide
  source 1..36: mol_type = other DNA
gggaactgcaggttaaactctactgtgctatgttta

SEQ ID NO: 478 - DNA, 36 bp, synthetic construct
  misc_feature 1..36: note = Synthetic oligonucleotide
  source 1..36: mol_type = other DNA
gcgtgggttcctctaccgtgccgaggttgttcctaa

SEQ ID NO: 479 - DNA, 38 bp, synthetic construct
  misc_feature 1..38: note = Synthetic oligonucleotide
  source 1..38: mol_type = other DNA
tcgcggtcagcaattctccaccgtgcgattacctttga

SEQ ID NO: 480 - DNA, 36 bp, synthetic construct
  misc_feature 1..36: note = Synthetic oligonucleotide
  source 1..36: mol_type = other DNA
tacacgtcaccttactctactgtgccgtaatcctca

SEQ ID NO: 481 - DNA, 38 bp, synthetic construct
  misc_feature 1..38: note = Synthetic oligonucleotide
  source 1..38: mol_type = other DNA
atgcactgtacgcaggtcacgcgttttaccactactga

SEQ ID NO: 482 - DNA, 38 bp, synthetic construct
  misc_feature 1..38: note = Synthetic oligonucleotide
  source 1..38: mol_type = other DNA
gttgcgtgctaacacacgtgactgcctatttcctatga

SEQ ID NO: 483 - DNA, 38 bp, synthetic construct
  misc_feature 1..38: note = Synthetic oligonucleotide
  source 1..38: mol_type = other DNA
gctactgcgataactctaccgtgccactcccttgttga

SEQ ID NO: 484 - DNA, 36 bp, synthetic construct
  misc_feature 1..36: note = Synthetic oligonucleotide
  source 1..36: mol_type = other DNA
tatccaaccactagtaagcctccaccgtgccattta

SEQ ID NO: 485 - DNA, 37 bp, synthetic construct
  misc_feature 1..37: note = Synthetic oligonucleotide
  source 1..37: mol_type = other DNA
gctagttaccagtaacctctaccgtgcctcttctgga

SEQ ID NO: 486 - DNA, 36 bp, synthetic construct
  misc_feature 1..36: note = Synthetic oligonucleotide
  source 1..36: mol_type = other DNA
cggcgaactcctctgtagcagtcgtgcggttcataa

SEQ ID NO: 487 - DNA, 35 bp, synthetic construct
  misc_feature 1..35: note = Synthetic oligonucleotide
  source 1..35: mol_type = other DNA
aactgcgtgcctagtacggacttgcacccttgtgg

SEQ ID NO: 488 - DNA, 35 bp, synthetic construct
  misc_feature 1..35: note = Synthetic oligonucleotide
  source 1..35: mol_type = other DNA
gcaggatccgttctttcaactcgcctatttctgga

SEQ ID NO: 489 - DNA, 35 bp, synthetic construct
  misc_feature 1..35: note = Synthetic oligonucleotide
  source 1..35: mol_type = other DNA
actgcgaagccttgcatccaattactctactgtgc

SEQ ID NO: 490 - DNA, 35 bp, synthetic construct
  misc_feature 1..35: note = Synthetic oligonucleotide
  source 1..35: mol_type = other DNA
gcgataatcttgtcattactctaccgtgccgttta

SEQ ID NO: 491 - DNA, 36 bp, synthetic construct
  misc_feature 1..36: note = Synthetic oligonucleotide
  source 1..36: mol_type = other DNA
atgccggcctattactacctaactctactgtgctta

SEQ ID NO: 492 - DNA, 37 bp, synthetic construct
  misc_feature 1..37: note = Synthetic oligonucleotide
  source 1..37: mol_type = other DNA
gcgatcaagcgtatttcttcttacctctactgtgcga

SEQ ID NO: 493 - DNA, 38 bp, synthetic construct
  misc_feature 1..38: note = Synthetic oligonucleotide
  source 1..38: mol_type = other DNA
gatgacacgccctttccactccactgtgcctgttttga

SEQ ID NO: 494 - DNA, 36 bp, synthetic construct
  misc_feature 1..36: note = Synthetic oligonucleotide
  source 1..36: mol_type = other DNA
tacatactccactgtgccacctttcccgactttcca

SEQ ID NO: 495 - DNA, 35 bp, synthetic construct
  misc_feature 1..35: note = Synthetic oligonucleotide
  source 1..35: mol_type = other DNA
catgcaagattttgcgtaacttaattaattgcttt

SEQ ID NO: 496 - DNA, 35 bp, synthetic construct
  misc_feature 1..35: note = Synthetic oligonucleotide
  source 1..35: mol_type = other DNA
gcactatatccgtacctaaacctccactgtgcttt

SEQ ID NO: 497 - DNA, 35 bp, synthetic construct
  misc_feature 1..35: note = Synthetic oligonucleotide
  source 1..35: mol_type = other DNA
gcgctataactccgatgtattctccaccgtgccca

SEQ ID NO: 498 - DNA, 36 bp, synthetic construct
  misc_feature 1..36: note = Synthetic oligonucleotide
  source 1..36: mol_type = other DNA
atcgtagtgctgcaggaaacgagattgatgcaccca

SEQ ID NO: 499 - DNA, 35 bp, synthetic construct
  misc_feature 1..35: note = Synthetic oligonucleotide
  source 1..35: mol_type = other DNA
tgcgagtgggatttcgtccgacacctcaccatgca

SEQ ID NO: 500 - DNA, 35 bp, synthetic construct
  misc_feature 1..35: note = Synthetic oligonucleotide
  source 1..35: mol_type = other DNA
agggtcatctagaacggttgacacgaaccgttgct

SEQ ID NO: 501 - DNA, 35 bp, synthetic construct
  misc_feature 1..35: note = Synthetic oligonucleotide
  source 1..35: mol_type = other DNA
gctaggaaaggacccaaatctctactgtgcctacc

SEQ ID NO: 502 - DNA, 35 bp, synthetic construct
  misc_feature 1..35: note = Synthetic oligonucleotide
  source 1..35: mol_type = other DNA
gcgaggaatacctatctctactgtgccaccaaacg

SEQ ID NO: 503 - DNA, 36 bp, synthetic construct
  misc_feature 1..36: note = Synthetic oligonucleotide
  source 1..36: mol_type = other DNA
gccgtttactctaccgtgccgtatcgatttccatta

SEQ ID NO: 504 - DNA, 35 bp, synthetic construct
  misc_feature 1..35: note = Synthetic oligonucleotide
  source 1..35: mol_type = other DNA
aggtcgtgcgtcccgttcaactagccctgttctca

SEQ ID NO: 505 - DNA, 35 bp, synthetic construct
  misc_feature 1..35: note = Synthetic oligonucleotide
  source 1..35: mol_type = other DNA
cattgcgttctggctttcgttcattttcgctttac

SEQ ID NO: 506 - DNA, 35 bp, synthetic construct
  misc_feature 1..35: note = Synthetic oligonucleotide
  source 1..35: mol_type = other DNA
gcactcatcgcggattatctccaccgtgccgacct

SEQ ID NO: 507 - DNA, 35 bp, synthetic construct
  misc_feature 1..35: note = Synthetic oligonucleotide
  source 1..35: mol_type = other DNA
catgccagctttaactttgagatctgttagttttc

SEQ ID NO: 508 - DNA, 36 bp, synthetic construct
  misc_feature 1..36: note = Synthetic oligonucleotide
  source 1..36: mol_type = other DNA
gccaggatctcaactgtgccattgcctttttctgaa

SEQ ID NO: 509 - DNA, 38 bp, synthetic construct
  misc_feature 1..38: note = Synthetic oligonucleotide
  source 1..38: mol_type = other DNA
ttacctccaccgtgccaatcactgtttgatcgccttga

SEQ ID NO: 510 - DNA, 36 bp, synthetic construct
  misc_feature 1..36: note = Synthetic oligonucleotide
  source 1..36: mol_type = other DNA
taacctaccaagtccaatttggagtctctacgatta

SEQ ID NO: 511 - DNA, 35 bp, synthetic construct
  misc_feature 1..35: note = Synthetic oligonucleotide
  source 1..35: mol_type = other DNA
gcctcaacttgagtttctatcattctccactgtgc

SEQ ID NO: 512 - DNA, 37 bp, synthetic construct
  misc_feature 1..37: note = Synthetic oligonucleotide
  source 1..37: mol_type = other DNA
catagctgcatactctaccgtgcactcattccctaga

SEQ ID NO: 513 - DNA, 37 bp, synthetic construct
  misc_feature 1..37: note = Synthetic oligonucleotide
  source 1..37: mol_type = other DNA
gacatcaactgcgaactcccctgagtgtgatatcgga

SEQ ID NO: 514 - DNA, 35 bp, synthetic construct
  misc_feature 1..35: note = Synthetic oligonucleotide
  source 1..35: mol_type = other DNA
tatctccaccgtgcccgttaataatctgatctgaa

SEQ ID NO: 515 - DNA, 36 bp, synthetic construct
  misc_feature 1..36: note = Synthetic oligonucleotide
  source 1..36: mol_type = other DNA
tgcgtgccaaacggactcaaggtaccatgcatcaca

SEQ ID NO: 516 - DNA, 36 bp, synthetic construct
  misc_feature 1..36: note = Synthetic oligonucleotide
  source 1..36: mol_type = other DNA
acatagactgccgagcgttcttctctaccgtgccca

SEQ ID NO: 517 - DNA, 36 bp, synthetic construct
  misc_feature 1..36: note = Synthetic oligonucleotide
  source 1..36: mol_type = other DNA
atgaccgaggtacccgacggcctcataggatccata

SEQ ID NO: 518 - DNA, 35 bp, synthetic construct
  misc_feature 1..35: note = Synthetic oligonucleotide
  source 1..35: mol_type = other DNA
gcggttatggggttctcaactgtgccaatctccat

SEQ ID NO: 519 - DNA, 35 bp, synthetic construct
  misc_feature 1..35: note = Synthetic oligonucleotide
  source 1..35: mol_type = other DNA
gggtcatgcgatttctttgttcactcaactcgccc

SEQ ID NO: 520 - DNA, 37 bp, synthetic construct
  misc_feature 1..37: note = Synthetic oligonucleotide
  source 1..37: mol_type = other DNA
gctgttgcgtccatatctccactgtgcttttggttga

SEQ ID NO: 521 - DNA, 35 bp, synthetic construct
  misc_feature 1..35: note = Synthetic oligonucleotide
  source 1..35: mol_type = other DNA
atgcgtgccaatacgacgtcaggccatgaagccat

SEQ ID NO: 522 - DNA, 36 bp, synthetic construct
  misc_feature 1..36: note = Synthetic oligonucleotide
  source 1..36: mol_type = other DNA
atgaactggtggacctttatcctctactgtgcaaaa

SEQ ID NO: 523 - DNA, 35 bp, synthetic construct
  misc_feature 1..35: note = Synthetic oligonucleotide
  source 1..35: mol_type = other DNA
ccgcgtgcctggaccttgcacgacatgcggcaata

SEQ ID NO: 524 - DNA, 38 bp, synthetic construct
  misc_feature 1..38: note = Synthetic oligonucleotide
  source 1..38: mol_type = other DNA
tctgcgggctagtatctaatgatctctaccgtgcttga

SEQ ID NO: 525 - DNA, 34 bp, synthetic construct
  misc_feature 1..34: note = Synthetic oligonucleotide
  source 1..34: mol_type = other DNA
catgcggaggcttttaacaccatgcattctcacc

SEQ ID NO: 526 - DNA, 37 bp, synthetic construct
  misc_feature 1..37: note = Synthetic oligonucleotide
  source 1..37: mol_type = other DNA
ttacgtatctgagcgctagtaccagtacctcgagtga

SEQ ID NO: 527 - DNA, 35 bp, synthetic construct
  misc_feature 1..35: note = Synthetic oligonucleotide
  source 1..35: mol_type = other DNA
agtcaggcccgcttttatttttgtggttatttttg

SEQ ID NO: 528 - DNA, 38 bp, synthetic construct
  misc_feature 1..38: note = Synthetic oligonucleotide
  source 1..38: mol_type = other DNA
cttgccctccgacatgaactctactgtgcaacctatga

SEQ ID NO: 529 - DNA, 32 bp, synthetic construct
  misc_feature 1..32: note = Synthetic oligonucleotide
  source 1..32: mol_type = other DNA
atcgcgtgccagaacgtaactcgcccatcgac

SEQ ID NO: 530 - DNA, 35 bp, synthetic construct
  misc_feature 1..35: note = Synthetic oligonucleotide
  source 1..35: mol_type = other DNA
tgacgcgtgcttggcaacgtggcaggacaattatt

SEQ ID NO: 531 - DNA, 36 bp, synthetic construct
  misc_feature 1..36: note = Synthetic oligonucleotide
  source 1..36: mol_type = other DNA
accgcgtgattggaagatactgcgtcttcgatttaa

SEQ ID NO: 532 - DNA, 35 bp, synthetic construct
  misc_feature 1..35: note = Synthetic oligonucleotide
  source 1..35: mol_type = other DNA
gtgtgctgaccttagcaaccgaactgaggccctac

SEQ ID NO: 533 - DNA, 36 bp, synthetic construct
  misc_feature 1..36: note = Synthetic oligonucleotide
  source 1..36: mol_type = other DNA
gcgcgccaaggtactgcggatagcgcattggacaca

SEQ ID NO: 534 - DNA, 35 bp, synthetic construct
  misc_feature 1..35: note = Synthetic oligonucleotide
  source 1..35: mol_type = other DNA
taccgacgcgctattttctactctactgtgctcat

SEQ ID NO: 535 - DNA, 35 bp, synthetic construct
  misc_feature 1..35: note = Synthetic oligonucleotide
  source 1..35: mol_type = other DNA
aaccgaacgtccgataaactcgccctactaatact

SEQ ID NO: 536 - DNA, 35 bp, synthetic construct
  misc_feature 1..35: note = Synthetic oligonucleotide
  source 1..35: mol_type = other DNA
accaggtccactttcggtgatagaccctgcacaca

SEQ ID NO: 537 - DNA, 35 bp, synthetic construct
  misc_feature 1..35: note = Synthetic oligonucleotide
  source 1..35: mol_type = other DNA
taaattgcccgtttgttctctactgtgccactccg

SEQ ID NO: 538 - DNA, 38 bp, synthetic construct
  misc_feature 1..38: note = Synthetic oligonucleotide
  source 1..38: mol_type = other DNA
gccaccttgactctgatccaactctactgtgccattga

SEQ ID NO: 539 - DNA, 38 bp, synthetic construct
  misc_feature 1..38: note = Synthetic oligonucleotide
  source 1..38: mol_type = other DNA
cgtgccaccgctggcttcctacttcgctttaactatga

SEQ ID NO: 540 - DNA, 35 bp, synthetic construct
  misc_feature 1..35: note = Synthetic oligonucleotide
  source 1..35: mol_type = other DNA
tgttctctactgtgcccgataacacgcttttgttc

SEQ ID NO: 541 - DNA, 36 bp, synthetic construct
  misc_feature 1..36: note = Synthetic oligonucleotide
  source 1..36: mol_type = other DNA
ctggtgctgcaccgtgtcacctatctttacgcatta

SEQ ID NO: 542 - DNA, 36 bp, synthetic construct
  misc_feature 1..36: note = Synthetic oligonucleotide
  source 1..36: mol_type = other DNA
atcgtagtacgaagctagccataacctgttatctca

SEQ ID NO: 543 - DNA, 38 bp, synthetic construct
  misc_feature 1..38: note = Synthetic oligonucleotide
  source 1..38: mol_type = other DNA
gcgtgttttatctctactgtgcgaacgtttggaattga

SEQ ID NO: 544 - DNA, 38 bp, synthetic construct
  misc_feature 1..38: note = Synthetic oligonucleotide
  source 1..38: mol_type = other DNA
agctaggggtatctctactgtgcgattcttccgggtga

SEQ ID NO: 545 - DNA, 36 bp, synthetic construct
  misc_feature 1..36: note = Synthetic oligonucleotide
  source 1..36: mol_type = other DNA
cgtgcccgctttattctccctggcttattggtccca

SEQ ID NO: 546 - DNA, 38 bp, synthetic construct
  misc_feature 1..38: note = Synthetic oligonucleotide
  source 1..38: mol_type = other DNA
gatgcgccgctttacactcttgttcttacccgctttga

SEQ ID NO: 547 - DNA, 35 bp, synthetic construct
  misc_feature 1..35: note = Synthetic oligonucleotide
  source 1..35: mol_type = other DNA
ggggcatgtaccaaccgttatttactctactgtgc

SEQ ID NO: 548 - DNA, 35 bp, synthetic construct
  misc_feature 1..35: note = Synthetic oligonucleotide
  source 1..35: mol_type = other DNA
gcatcgtgtccatgcccaaatggttcgtcttttta

SEQ ID NO: 549 - DNA, 38 bp, synthetic construct
  misc_feature 1..38: note = Synthetic oligonucleotide
  source 1..38: mol_type = other DNA
atgcactggacgcgcatgtcgtttcatttctccattga

SEQ ID NO: 550 - DNA, 34 bp, synthetic construct
  misc_feature 1..34: note = Synthetic oligonucleotide
  source 1..34: mol_type = other DNA
aagcacgggctgcattcgattcaggtaaacaatt

SEQ ID NO: 551 - DNA, 37 bp, synthetic construct
  misc_feature 1..37: note = Synthetic oligonucleotide
  source 1..37: mol_type = other DNA
acacccgcatgaggtatcctgtggatcgtgggacgga

SEQ ID NO: 552 - DNA, 35 bp, synthetic construct
  misc_feature 1..35: note = Synthetic oligonucleotide
  source 1..35: mol_type = other DNA
gccagctttcgttcatataccactatcgctttgta

SEQ ID NO: 553 - DNA, 38 bp, synthetic construct
  misc_feature 1..38: note = Synthetic oligonucleotide
  source 1..38: mol_type = other DNA
acagtcataacagactccgctgcgtgctaagcggatga

SEQ ID NO: 554 - DNA, 36 bp, synthetic construct
  misc_feature 1..36: note = Synthetic oligonucleotide
  source 1..36: mol_type = other DNA
gcgcgctaacgggtatctgcaggtcctactagttta

SEQ ID NO: 555 - DNA, 35 bp, synthetic construct
  misc_feature 1..35: note = Synthetic oligonucleotide
  source 1..35: mol_type = other DNA
atgcacctgtctgtcagtccccgctaggccatatt

SEQ ID NO: 556 - DNA, 38 bp, synthetic construct
  misc_feature 1..38: note = Synthetic oligonucleotide
  source 1..38: mol_type = other DNA
ccatgcgcccggttgagatttaacggatctcgctttga

SEQ ID NO: 557 - DNA, 35 bp, synthetic construct
  misc_feature 1..35: note = Synthetic oligonucleotide
  source 1..35: mol_type = other DNA
gcacacctcgctttaacacttgtaactacgcttca

SEQ ID NO: 558 - DNA, 35 bp, synthetic construct
  misc_feature 1..35: note = Synthetic oligonucleotide
  source 1..35: mol_type = other DNA
tcacctactaaggactgatagctgcctacattgtt

SEQ ID NO: 559 - DNA, 36 bp, synthetic construct
  misc_feature 1..36: note = Synthetic oligonucleotide
  source 1..36: mol_type = other DNA
ccacgagtctaggggcgtaacgcagtaaggcataca

SEQ ID NO: 560 - DNA, 38 bp, synthetic construct
  misc_feature 1..38: note = Synthetic oligonucleotide
  source 1..38: mol_type = other DNA
acatgcgtgctaaggtactactggtgtcgaacctttga

SEQ ID NO: 561 - DNA, 35 bp, synthetic construct
  misc_feature 1..35: note = Synthetic oligonucleotide
  source 1..35: mol_type = other DNA
atcgtagtacatacagtgcgtttcgtaaattgcct

SEQ ID NO: 562 - DNA, 35 bp, synthetic construct
  misc_feature 1..35: note = Synthetic oligonucleotide
  source 1..35: mol_type = other DNA
gcgccccgactgccactagcttttaattctcgctt

SEQ ID NO: 563 - DNA, 36 bp, synthetic construct
  misc_feature 1..36: note = Synthetic oligonucleotide
  source 1..36: mol_type = other DNA
tgctagctggcccatactcaactgtgcgttactcaa

SEQ ID NO: 564 - DNA, 35 bp, synthetic construct
  misc_feature 1..35: note = Synthetic oligonucleotide
  source 1..35: mol_type = other DNA
actctgcatccttcaactctactgtgcggttattt

SEQ ID NO: 565 - DNA, 38 bp, synthetic construct
  misc_feature 1..38: note = Synthetic oligonucleotide
  source 1..38: mol_type = other DNA
gctaactgcagggcacacaatctcttaaggcttaatga

SEQ ID NO: 566 - DNA, 35 bp, synthetic construct
  misc_feature 1..35: note = Synthetic oligonucleotide
  source 1..35: mol_type = other DNA
gcgtgggcctggtctttactactaaacaaattggt

SEQ ID NO: 567 - DNA, 35 bp, synthetic construct
  misc_feature 1..35: note = Synthetic oligonucleotide
  source 1..35: mol_type = other DNA
gatcgtaacgcactgagggtcaggcattacccgcc

SEQ ID NO: 568 - DNA, 37 bp, synthetic construct
  misc_feature 1..37: note = Synthetic oligonucleotide
  source 1..37: mol_type = other DNA
gcccggggctaggggaaagaacctgccggtcatggga

SEQ ID NO: 569 - DNA, 35 bp, synthetic construct
  misc_feature 1..35: note = Synthetic oligonucleotide
  source 1..35: mol_type = other DNA
gcgacctagggtaacgatcgtagttcacccataat

SEQ ID NO: 570 - DNA, 36 bp, synthetic construct
  misc_feature 1..36: note = Synthetic oligonucleotide
  source 1..36: mol_type = other DNA
ttacctaccacagtctccgcctcgttatccttatca

SEQ ID NO: 571 - DNA, 36 bp, synthetic construct
  misc_feature 1..36: note = Synthetic oligonucleotide
  source 1..36: mol_type = other DNA
gccgcgtgcctggccgtggtgcatcactaagttgaa

SEQ ID NO: 572 - DNA, 35 bp, synthetic construct
  misc_feature 1..35: note = Synthetic oligonucleotide
  source 1..35: mol_type = other DNA
ggcgcgcgctagccatacgaactgcttgaacattt

SEQ ID NO: 573 - DNA, 37 bp, synthetic construct
  misc_feature 1..37: note = Synthetic oligonucleotide
  source 1..37: mol_type = other DNA
tgcgaatcgtagccatcgtccactgctgatttgcgga

SEQ ID NO: 574 - DNA, 36 bp, synthetic construct
  misc_feature 1..36: note = Synthetic oligonucleotide
  source 1..36: mol_type = other DNA
gcgaccgattcttctctcaaacgcttacttctatga

SEQ ID NO: 575 - DNA, 35 bp, synthetic construct
  misc_feature 1..35: note = Synthetic oligonucleotide
  source 1..35: mol_type = other DNA
gccaaatgatctccactgtgcgaaatgggcttttt

SEQ ID NO: 576 - DNA, 38 bp, synthetic construct
  misc_feature 1..38: note = Synthetic oligonucleotide
  source 1..38: mol_type = other DNA
tgagcacacaatggacgtgacaccaatctttcttatga

SEQ ID NO: 577 - DNA, 36 bp, synthetic construct
  misc_feature 1..36: note = Synthetic oligonucleotide
  source 1..36: mol_type = other DNA
tcatcacgcgctagtgaacgtgttgtagcaccccta

SEQ ID NO: 578 - DNA, 36 bp, synthetic construct
  misc_feature 1..36: note = Synthetic oligonucleotide
  source 1..36: mol_type = other DNA
tcatgtgcgtgccaactgacgaggtgcaggctagcc

SEQ ID NO: 579 - DNA, 38 bp, synthetic construct
  misc_feature 1..38: note = Synthetic oligonucleotide
  source 1..38: mol_type = other DNA
atcgtagctgctgcagtcccctgtcttaatatccctga

SEQ ID NO: 580 - DNA, 36 bp, synthetic construct
  misc_feature 1..36: note = Synthetic oligonucleotide
  source 1..36: mol_type = other DNA
cgtatcgtagacgttacggaaggagataatgcgcaa

SEQ ID NO: 581 - DNA, 36 bp, synthetic construct
  misc_feature 1..36: note = Synthetic oligonucleotide
  source 1..36: mol_type = other DNA
cttgccagctttccttgtcttcgctttcattacata

SEQ ID NO: 582 - DNA, 38 bp, synthetic construct
  misc_feature 1..38: note = Synthetic oligonucleotide
  source 1..38: mol_type = other DNA
gctgtcattgaatctctactgtgcgatccactttttga

SEQ ID NO: 583 - DNA, 38 bp, synthetic construct
  misc_feature 1..38: note = Synthetic oligonucleotide
  source 1..38: mol_type = other DNA
catgcgccagcttcttctgattttatctatctctatga

SEQ ID NO: 584 - DNA, 36 bp, synthetic construct
  misc_feature 1..36: note = Synthetic oligonucleotide
  source 1..36: mol_type = other DNA
ccatgcccgcttaagcttcttttctatgtttctacg

SEQ ID NO: 585 - DNA, 35 bp, synthetic construct
  misc_feature 1..35: note = Synthetic oligonucleotide
  source 1..35: mol_type = other DNA
tagcaggagtaccctccaccgtgcacattgtttcc

SEQ ID NO: 586 - DNA, 37 bp, synthetic construct
  misc_feature 1..37: note = Synthetic oligonucleotide
  source 1..37: mol_type = other DNA
catgcccgctttgtttctccgctttttggtattccga

SEQ ID NO: 587 - DNA, 36 bp, synthetic construct
  misc_feature 1..36: note = Synthetic oligonucleotide
  source 1..36: mol_type = other DNA
atgcacgtcgaaaggcatgcggtacaactcctatga

SEQ ID NO: 588 - DNA, 35 bp, synthetic construct
  misc_feature 1..35: note = Synthetic oligonucleotide
  source 1..35: mol_type = other DNA
agacagcaggcatagcggggaacctctaccgtgcc

SEQ ID NO: 589 - DNA, 35 bp, synthetic construct
  misc_feature 1..35: note = Synthetic oligonucleotide
  source 1..35: mol_type = other DNA
aagtaacgcgggttacaactttttctccaccgtgc

SEQ ID NO: 590 - DNA, 36 bp, synthetic construct
  misc_feature 1..36: note = Synthetic oligonucleotide
  source 1..36: mol_type = other DNA
acagtctcatgcccgcttttaatcataccgcttaca

SEQ ID NO: 591 - DNA, 38 bp, synthetic construct
  misc_feature 1..38: note = Synthetic oligonucleotide
  source 1..38: mol_type = other DNA
gcgcccgaccattccctaagcttttgaccccactatga

SEQ ID NO: 592 - DNA, 37 bp, synthetic construct
  misc_feature 1..37: note = Synthetic oligonucleotide
  source 1..37: mol_type = other DNA
gcgacgactatcgcttgttcttgaatacctcgcttta

SEQ ID NO: 593 - DNA, 34 bp, synthetic construct
  misc_feature 1..34: note = Synthetic oligonucleotide
  source 1..34: mol_type = other DNA
aaactctactgtgcctcagtttcaaaccggttct

SEQ ID NO: 594 - DNA, 35 bp, synthetic construct
  misc_feature 1..35: note = Synthetic oligonucleotide
  source 1..35: mol_type = other DNA
gtcgtagtactgcgaaatgggccatgcgcaaactt

SEQ ID NO: 595 - DNA, 35 bp, synthetic construct
  misc_feature 1..35: note = Synthetic oligonucleotide
  source 1..35: mol_type = other DNA
cgtgcggatttctccaccgtgcttttgacctctga

SEQ ID NO: 596 - DNA, 38 bp, synthetic construct
  misc_feature 1..38: note = Synthetic oligonucleotide
  source 1..38: mol_type = other DNA
gactgcgacctacacttatttgctctactgtgccttga

SEQ ID NO: 597 - DNA, 35 bp, synthetic construct
  misc_feature 1..35: note = Synthetic oligonucleotide
  source 1..35: mol_type = other DNA
catgcggcttctaccaggtcaaactagccccaatt

SEQ ID NO: 598 - DNA, 36 bp, synthetic construct
  misc_feature 1..36: note = Synthetic oligonucleotide
  source 1..36: mol_type = other DNA
aaccggagctaggtacgtgtctgtcaggcatgaaga

SEQ ID NO: 599 - DNA, 36 bp, synthetic construct
  misc_feature 1..36: note = Synthetic oligonucleotide
  source 1..36: mol_type = other DNA
atgagtccgcgtgcctggacctttacccccgacgaa

SEQ ID NO: 600 - DNA, 38 bp, synthetic construct
  misc_feature 1..38: note = Synthetic oligonucleotide
  source 1..38: mol_type = other DNA
catgccgtacgcttattggatacaccatcgctttttga

SEQ ID NO: 601 - DNA, 37 bp, synthetic construct
  misc_feature 1..37: note = Synthetic oligonucleotide
  source 1..37: mol_type = other DNA
gcgttggtgttcctctctactgtgcctgattttttga

SEQ ID NO: 602 - DNA, 37 bp, synthetic construct
  misc_feature 1..37: note = Synthetic oligonucleotide
  source 1..37: mol_type = other DNA
atcgtagtactgcacgggtgccacgtgtcttcccaga

SEQ ID NO: 603 - DNA, 35 bp, synthetic construct
  misc_feature 1..35: note = Synthetic oligonucleotide
  source 1..35: mol_type = other DNA
aggcacgtacaggcatcgaccgctttcttctttcc

SEQ ID NO: 604 - DNA, 36 bp, synthetic construct
  misc_feature 1..36: note = Synthetic oligonucleotide
  source 1..36: mol_type = other DNA
gccatgcgggataatattaaatcctctaccgtgcca

SEQ ID NO: 605 - DNA, 37 bp, synthetic construct
  misc_feature 1..37: note = Synthetic oligonucleotide
  source 1..37: mol_type = other DNA
tctgccatgcggctcattccgaaactctactgtgcga

SEQ ID NO: 606 - DNA, 35 bp, synthetic construct
  misc_feature 1..35: note = Synthetic oligonucleotide
  source 1..35: mol_type = other DNA
ttttgcgattcctctactgtgccttctggttttgt

SEQ ID NO: 607 - DNA, 35 bp, synthetic construct
  misc_feature 1..35: note = Synthetic oligonucleotide
  source 1..35: mol_type = other DNA
ctgcagcaatcatgcaggctttcatcgctttcatc

SEQ ID NO: 608 - DNA, 35 bp, synthetic construct
  misc_feature 1..35: note = Synthetic oligonucleotide
  source 1..35: mol_type = other DNA
tcacctaccaagatctctcgcgccctatagtttct

SEQ ID NO: 609 - DNA, 35 bp, synthetic construct
  misc_feature 1..35: note = Synthetic oligonucleotide
  source 1..35: mol_type = other DNA
caccgcgtgccaggggatcggaatgatatcaactg

SEQ ID NO: 610 - DNA, 36 bp, synthetic construct
  misc_feature 1..36: note = Synthetic oligonucleotide
  source 1..36: mol_type = other DNA
taaactaccaagggcatgccaccatctactacatga

SEQ ID NO: 611 - DNA, 35 bp, synthetic construct
  misc_feature 1..35: note = Synthetic oligonucleotide
  source 1..35: mol_type = other DNA
atcgtagtactgaaaagcgggatccagttctaatt

SEQ ID NO: 612 - DNA, 35 bp, synthetic construct
  misc_feature 1..35: note = Synthetic oligonucleotide
  source 1..35: mol_type = other DNA
gaaggcaagcacccccctgctcaactagccaacaa

SEQ ID NO: 613 - DNA, 38 bp, synthetic construct
  misc_feature 1..38: note = Synthetic oligonucleotide
  source 1..38: mol_type = other DNA
ctgccctcgttctccaccgtgcccactttgtaaactga

SEQ ID NO: 614 - DNA, 36 bp, synthetic construct
  misc_feature 1..36: note = Synthetic oligonucleotide
  source 1..36: mol_type = other DNA
gatgcaagggcccgttagtactggggtctaattaaa

SEQ ID NO: 615 - DNA, 38 bp, synthetic construct
  misc_feature 1..38: note = Synthetic oligonucleotide
  source 1..38: mol_type = other DNA
catgcgatggtcttgcacttggttagtaatctccttga

SEQ ID NO: 616 - DNA, 35 bp, synthetic construct
  misc_feature 1..35: note = Synthetic oligonucleotide
  source 1..35: mol_type = other DNA
gtgcgcgctaacacggagagtctcaacttaacctg

SEQ ID NO: 617 - DNA, 36 bp, synthetic construct
  misc_feature 1..36: note = Synthetic oligonucleotide
  source 1..36: mol_type = other DNA
aacaaattgccgtggggacgtggtcatgcggattta

SEQ ID NO: 618 - DNA, 36 bp, synthetic construct
  misc_feature 1..36: note = Synthetic oligonucleotide
  source 1..36: mol_type = other DNA
gcgtggcacgaagctttctatttttacttgattcca

SEQ ID NO: 619 - DNA, 35 bp, synthetic construct
  misc_feature 1..35: note = Synthetic oligonucleotide
  source 1..35: mol_type = other DNA
caatgccagcttacgtttatatcccaattcgcttt

SEQ ID NO: 620 - DNA, 35 bp, synthetic construct
  misc_feature 1..35: note = Synthetic oligonucleotide
  source 1..35: mol_type = other DNA
aacggtcatgccagcttttggtacttagttctcct

SEQ ID NO: 621 - DNA, 37 bp, synthetic construct
  misc_feature 1..37: note = Synthetic oligonucleotide
  source 1..37: mol_type = other DNA
gaacgcaggcatccgcattagctttttccttctatga

SEQ ID NO: 622 - DNA, 36 bp, synthetic construct
  misc_feature 1..36: note = Synthetic oligonucleotide
  source 1..36: mol_type = other DNA
gcgccccgtacagcatcgtgtcatggacctacccta

SEQ ID NO: 623 - DNA, 37 bp, synthetic construct
  misc_feature 1..37: note = Synthetic oligonucleotide
  source 1..37: mol_type = other DNA
tcgtagtaactgcaggatccactccactctcatttga

SEQ ID NO: 624 - DNA, 35 bp, synthetic construct
  misc_feature 1..35: note = Synthetic oligonucleotide
  source 1..35: mol_type = other DNA
atgcactgtacgagcgggatcgctagtttacaaca

SEQ ID NO: 625 - DNA, 35 bp, synthetic construct
  misc_feature 1..35: note = Synthetic oligonucleotide
  source 1..35: mol_type = other DNA
gcgcgctaacgtcactgcacatccagggccctatc

SEQ ID NO: 626 - DNA, 38 bp, synthetic construct
  misc_feature 1..38: note = Synthetic oligonucleotide
  source 1..38: mol_type = other DNA
acccgatcgtagggaacgtaccgataacaaaattatga

SEQ ID NO: 627 - DNA, 36 bp, synthetic construct
  misc_feature 1..36: note = Synthetic oligonucleotide
  source 1..36: mol_type = other DNA
actggtaggcatcgacctcaagctttctcaacatca

SEQ ID NO: 628 - DNA, 35 bp, synthetic construct
  misc_feature 1..35: note = Synthetic oligonucleotide
  source 1..35: mol_type = other DNA
acacctaccaggtcacgcgttcgaacttcacttaa

SEQ ID NO: 629 - DNA, 35 bp, synthetic construct
  misc_feature 1..35: note = Synthetic oligonucleotide
  source 1..35: mol_type = other DNA
accgcgcgctagggacgggatgcttcggcctgtta

SEQ ID NO: 630 - DNA, 35 bp, synthetic construct
  misc_feature 1..35: note = Synthetic oligonucleotide
  source 1..35: mol_type = other DNA
taagcaactagggtgctgtcatcgcgatctctttt

SEQ ID NO: 631 - DNA, 35 bp, synthetic construct
  misc_feature 1..35: note = Synthetic oligonucleotide
  source 1..35: mol_type = other DNA
atcccgggactagggcgacgtgatgcatctctcat

SEQ ID NO: 632 - DNA, 35 bp, synthetic construct
  misc_feature 1..35: note = Synthetic oligonucleotide
  source 1..35: mol_type = other DNA
gacaaggtctgcccgcttcccacactacgcttaca

SEQ ID NO: 633 - DNA, 36 bp, synthetic construct
  misc_feature 1..36: note = Synthetic oligonucleotide
  source 1..36: mol_type = other DNA
gcgcccgcttctcataactatggctttattctcaca

SEQ ID NO: 634 - DNA, 36 bp, synthetic construct
  misc_feature 1..36: note = Synthetic oligonucleotide
  source 1..36: mol_type = other DNA
tgctccgggcctaggagattctacgtacgcaatgca

SEQ ID NO: 635 - DNA, 36 bp, synthetic construct
  misc_feature 1..36: note = Synthetic oligonucleotide
  source 1..36: mol_type = other DNA
gccagactcgccccctatttttttggaactcgccta

SEQ ID NO: 636 - DNA, 38 bp, synthetic construct
  misc_feature 1..38: note = Synthetic oligonucleotide
  source 1..38: mol_type = other DNA
gcatccgttaaactcgcctctcaaatcgaatcccatga

SEQ ID NO: 637 - DNA, 35 bp, synthetic construct
  misc_feature 1..35: note = Synthetic oligonucleotide
  source 1..35: mol_type = other DNA
ctcgcagcatgcgaaggctttactcacaactatcg

SEQ ID NO: 638 - DNA, 37 bp, synthetic construct
  misc_feature 1..37: note = Synthetic oligonucleotide
  source 1..37: mol_type = other DNA
ccgtgcgaacgttatgcgaccatgcgctctctcttga

SEQ ID NO: 639 - DNA, 38 bp, synthetic construct
  misc_feature 1..38: note = Synthetic oligonucleotide
  source 1..38: mol_type = other DNA
gtctagccgcttttgttatgatattcttctctttatga

SEQ ID NO: 640 - DNA, 36 bp, synthetic construct
  misc_feature 1..36: note = Synthetic oligonucleotide
  source 1..36: mol_type = other DNA
gcgtgccaacgtaccttccttatctggtgaactaca

SEQ ID NO: 641 - DNA, 35 bp, synthetic construct
  misc_feature 1..35: note = Synthetic oligonucleotide
  source 1..35: mol_type = other DNA
gtgcgcgctaacactcctctcggtcatttgctgga

SEQ ID NO: 642 - DNA, 35 bp, synthetic construct
  misc_feature 1..35: note = Synthetic oligonucleotide
  source 1..35: mol_type = other DNA
agcgcgtgattgcacgtgactgcacttctaatctt

SEQ ID NO: 643 - DNA, 35 bp, synthetic construct
  misc_feature 1..35: note = Synthetic oligonucleotide
  source 1..35: mol_type = other DNA
tccgaacctaggaagccggatggaacatgcgccca

SEQ ID NO: 644 - DNA, 35 bp, synthetic construct
  misc_feature 1..35: note = Synthetic oligonucleotide
  source 1..35: mol_type = other DNA
catcgcaagctttaatacaaaccctatccattgct

SEQ ID NO: 645 - DNA, 36 bp, synthetic construct
  misc_feature 1..36: note = Synthetic oligonucleotide
  source 1..36: mol_type = other DNA
actgcgtgccgagtacaggactacagttaatggcaa

SEQ ID NO: 646 - DNA, 35 bp, synthetic construct
  misc_feature 1..35: note = Synthetic oligonucleotide
  source 1..35: mol_type = other DNA
ccatgcgtgcctatggacgtccccaaacattgtct

SEQ ID NO: 647 - DNA, 35 bp, synthetic construct
  misc_feature 1..35: note = Synthetic oligonucleotide
  source 1..35: mol_type = other DNA
tatcgcgggcaggcgattcgcttgtatttaatccg

SEQ ID NO: 648 - DNA, 36 bp, synthetic construct
  misc_feature 1..36: note = Synthetic oligonucleotide
  source 1..36: mol_type = other DNA
actgcaccgtgtcatggcgagagctcacctaattca

SEQ ID NO: 649 - DNA, 35 bp, synthetic construct
  misc_feature 1..35: note = Synthetic oligonucleotide
  source 1..35: mol_type = other DNA
gacatgcaaaggcccttaattgactccactgtgcc

SEQ ID NO: 650 - DNA, 35 bp, synthetic construct
  misc_feature 1..35: note = Synthetic oligonucleotide
  source 1..35: mol_type = other DNA
catttgcgtgcctaaatgcggcgcgggctggcgac

SEQ ID NO: 651 - DNA, 35 bp, synthetic construct
  misc_feature 1..35: note = Synthetic oligonucleotide
  source 1..35: mol_type = other DNA
gctggccaatgtatctcaaccgtgccgaaattatt

SEQ ID NO: 652 - DNA, 35 bp, synthetic construct
  misc_feature 1..35: note = Synthetic oligonucleotide
  source 1..35: mol_type = other DNA
tgctaggactagccggttttctattactctatttt

SEQ ID NO: 653 - DNA, 36 bp, synthetic construct
  misc_feature 1..36: note = Synthetic oligonucleotide
  source 1..36: mol_type = other DNA
tccggagctaggaactacggcgatctctgcgcctaa

SEQ ID NO: 654 - DNA, 35 bp, synthetic construct
  misc_feature 1..35: note = Synthetic oligonucleotide
  source 1..35: mol_type = other DNA
gcctagtggacaccccgattcgaccttttttgctt

SEQ ID NO: 655 - DNA, 36 bp, synthetic construct
  misc_feature 1..36: note = Synthetic oligonucleotide
  source 1..36: mol_type = other DNA
agtggaccaacggatcgcgtgccaggccgatgggca

SEQ ID NO: 656 - DNA, 36 bp, synthetic construct
  misc_feature 1..36: note = Synthetic oligonucleotide
  source 1..36: mol_type = other DNA
gataaccagtgtcatgcaaacactatacattcctta

SEQ ID NO: 657 - DNA, 35 bp, synthetic construct
  misc_feature 1..35: note = Synthetic oligonucleotide
  source 1..35: mol_type = other DNA
actgcacaacattgattctgacaggttgacaccaa

SEQ ID NO: 658 - DNA, 38 bp, synthetic construct
  misc_feature 1..38: note = Synthetic oligonucleotide
  source 1..38: mol_type = other DNA
agtgcgcaatagtgcgacaagcttctatccatttttga

SEQ ID NO: 659 - DNA, 36 bp, synthetic construct
  misc_feature 1..36: note = Synthetic oligonucleotide
  source 1..36: mol_type = other DNA
gctgacgttcgtagtccatgtacgggctgtcatcaa

SEQ ID NO: 660 - DNA, 36 bp, synthetic construct
  misc_feature 1..36: note = Synthetic oligonucleotide
  source 1..36: mol_type = other DNA
tcgtgcagtatcgcggtcatgtcacactcccgtaca

SEQ ID NO: 661 - DNA, 36 bp, synthetic construct
  misc_feature 1..36: note = Synthetic oligonucleotide
  source 1..36: mol_type = other DNA
agcacgatcgtagtgcgaatcgaacggggtctgcga

SEQ ID NO: 662 - DNA, 36 bp, synthetic construct
  misc_feature 1..36: note = Synthetic oligonucleotide
  source 1..36: mol_type = other DNA
gcgcgctaacgactgtaggaatccaattctgaccga

SEQ ID NO: 663 - DNA, 38 bp, synthetic construct
  misc_feature 1..38: note = Synthetic oligonucleotide
  source 1..38: mol_type = other DNA
agtgactgcgggcactgcgatcgcttttgattatttga

SEQ ID NO: 664 - DNA, 36 bp, synthetic construct
  misc_feature 1..36: note = Synthetic oligonucleotide
  source 1..36: mol_type = other DNA
agccacccatcctcaaccgtgccataatcgcctcta

SEQ ID NO: 665 - DNA, 35 bp, synthetic construct
  misc_feature 1..35: note = Synthetic oligonucleotide
  source 1..35: mol_type = other DNA
gcctctaccgtgcctgtgacccaccagttttttat

SEQ ID NO: 666 - DNA, 35 bp, synthetic construct
  misc_feature 1..35: note = Synthetic oligonucleotide
  source 1..35: mol_type = other DNA
tcgtagtacgcaggtggtcaagcacgatttcttta

SEQ ID NO: 667 - DNA, 38 bp, synthetic construct
  misc_feature 1..38: note = Synthetic oligonucleotide
  source 1..38: mol_type = other DNA
tcagtacgcactagtacattgccaagctttccacatga

SEQ ID NO: 668 - DNA, 35 bp, synthetic construct
  misc_feature 1..35: note = Synthetic oligonucleotide
  source 1..35: mol_type = other DNA
aagcggaactagccaaggcaagggaaatgccctca

SEQ ID NO: 669 - DNA, 35 bp, synthetic construct
  misc_feature 1..35: note = Synthetic oligonucleotide
  source 1..35: mol_type = other DNA
ggaccgaatctaggctgtactgtgcacgcatcgcc

SEQ ID NO: 670 - DNA, 35 bp, synthetic construct
  misc_feature 1..35: note = Synthetic oligonucleotide
  source 1..35: mol_type = other DNA
ttacctacctggtcaggcataacatttagttcctc

SEQ ID NO: 671 - DNA, 38 bp, synthetic construct
  misc_feature 1..38: note = Synthetic oligonucleotide
  source 1..38: mol_type = other DNA
aagaccgcgtgccaggtcaacgtacgcacatgcaatga

SEQ ID NO: 672 - DNA, 38 bp, synthetic construct
  misc_feature 1..38: note = Synthetic oligonucleotide
  source 1..38: mol_type = other DNA
atcgtagtactgtagggcctctgtttcactcaatatga

SEQ ID NO: 673 - DNA, 35 bp, synthetic construct
  misc_feature 1..35: note = Synthetic oligonucleotide
  source 1..35: mol_type = other DNA
aggacaggcgggttttgctgacgttgtctatactg

SEQ ID NO: 674 - DNA, 35 bp, synthetic construct
  misc_feature 1..35: note = Synthetic oligonucleotide
  source 1..35: mol_type = other DNA
tactccactgtgcatccgatcttcttccccaactc

SEQ ID NO: 675 - DNA, 37 bp, synthetic construct
  misc_feature 1..37: note = Synthetic oligonucleotide
  source 1..37: mol_type = other DNA
tctccactgtgcccgtaacttttcttttactgtccga

SEQ ID NO: 676 - DNA, 36 bp, synthetic construct
  misc_feature 1..36: note = Synthetic oligonucleotide
  source 1..36: mol_type = other DNA
ccgggcctaggaggactgcatgacccctttaaccaa

SEQ ID NO: 677 - DNA, 35 bp, synthetic construct
  misc_feature 1..35: note = Synthetic oligonucleotide
  source 1..35: mol_type = other DNA
ccgggcctaggacggttccacagtcagcgaatcct

SEQ ID NO: 678 - DNA, 35 bp, synthetic construct
  misc_feature 1..35: note = Synthetic oligonucleotide
  source 1..35: mol_type = other DNA
aacgcgcgcttgggatgtatgcatcatctagattt

SEQ ID NO: 679 - DNA, 35 bp, synthetic construct
  misc_feature 1..35: note = Synthetic oligonucleotide
  source 1..35: mol_type = other DNA
cacgacgcaccttaccgctttctatttttccgctt

SEQ ID NO: 680 - DNA, 35 bp, synthetic construct
  misc_feature 1..35: note = Synthetic oligonucleotide
  source 1..35: mol_type = other DNA
gcacttggccgctttaactactacgctttgtcctc

SEQ ID NO: 681 - DNA, 37 bp, synthetic construct
  misc_feature 1..37: note = Synthetic oligonucleotide
  source 1..37: mol_type = other DNA
cgtgtacgccagtgccgtgcagtcaggcgatctatga

SEQ ID NO: 682 - DNA, 36 bp, synthetic construct
  misc_feature 1..36: note = Synthetic oligonucleotide
  source 1..36: mol_type = other DNA
cttaggcaatgacgtgcccttatgcgacttcgccca

SEQ ID NO: 683 - DNA, 38 bp, synthetic construct
  misc_feature 1..38: note = Synthetic oligonucleotide
  source 1..38: mol_type = other DNA
gcaccgtttccaccgcgcgtggatcttcccaactttga

SEQ ID NO: 684 - DNA, 35 bp, synthetic construct
  misc_feature 1..35: note = Synthetic oligonucleotide
  source 1..35: mol_type = other DNA
gcggacctagcttacggactgtaattaacgttttt

SEQ ID NO: 685 - DNA, 38 bp, synthetic construct
  misc_feature 1..38: note = Synthetic oligonucleotide
  source 1..38: mol_type = other DNA
atgcgcatcccctctaccgtgcaattttccatccctga

SEQ ID NO: 686 - DNA, 36 bp, synthetic construct
  misc_feature 1..36: note = Synthetic oligonucleotide
  source 1..36: mol_type = other DNA
gacgcgcgccagacagggaactgcacaggcatgcca

SEQ ID NO: 687 - DNA, 35 bp, synthetic construct
  misc_feature 1..35: note = Synthetic oligonucleotide
  source 1..35: mol_type = other DNA
ccgagactaggacccctgtgttcatgcgctatttc

SEQ ID NO: 688 - DNA, 35 bp, synthetic construct
  misc_feature 1..35: note = Synthetic oligonucleotide
  source 1..35: mol_type = other DNA
gctaactgcaggcacagcctaagaaacctcatgta

SEQ ID NO: 689 - DNA, 38 bp, synthetic construct
  misc_feature 1..38: note = Synthetic oligonucleotide
  source 1..38: mol_type = other DNA
tgcagtctagcccgcttaatgtattccttgattcttga

SEQ ID NO: 690 - DNA, 35 bp, synthetic construct
  misc_feature 1..35: note = Synthetic oligonucleotide
  source 1..35: mol_type = other DNA
gcgtgctagcgtactgcatggatactttggtagct

SEQ ID NO: 691 - DNA, 38 bp, synthetic construct
  misc_feature 1..38: note = Synthetic oligonucleotide
  source 1..38: mol_type = other DNA
tcgtagtacagcagaccctccctacctacaattggtga

SEQ ID NO: 692 - DNA, 35 bp, synthetic construct
  misc_feature 1..35: note = Synthetic oligonucleotide
  source 1..35: mol_type = other DNA
gccgctgactgagttctctctactgtgcgtatttt

SEQ ID NO: 693 - DNA, 36 bp, synthetic construct
  misc_feature 1..36: note = Synthetic oligonucleotide
  source 1..36: mol_type = other DNA
gccagcagccctgaactcctctgaagcatcgccgca

SEQ ID NO: 694 - DNA, 35 bp, synthetic construct
  misc_feature 1..35: note = Synthetic oligonucleotide
  source 1..35: mol_type = other DNA
taggtctgcacatgcgctaggcttttcttaccctg

SEQ ID NO: 695 - DNA, 38 bp, synthetic construct
  misc_feature 1..38: note = Synthetic oligonucleotide
  source 1..38: mol_type = other DNA
gcgacgccccacgctttgacctaaacccatcaatatga

SEQ ID NO: 696 - DNA, 38 bp, synthetic construct
  misc_feature 1..38: note = Synthetic oligonucleotide
  source 1..38: mol_type = other DNA
cgctacagacatgcgcatcttgacttatattcaattga

SEQ ID NO: 697 - DNA, 35 bp, synthetic construct
  misc_feature 1..35: note = Synthetic oligonucleotide
  source 1..35: mol_type = other DNA
atgcactactgcgagcgagcacaggtttcctcctt

SEQ ID NO: 698 - DNA, 38 bp, synthetic construct
  misc_feature 1..38: note = Synthetic oligonucleotide
  source 1..38: mol_type = other DNA
aacgcgtgccagagaagaaccgcggtctcgccccatga

SEQ ID NO: 699 - DNA, 35 bp, synthetic construct
  misc_feature 1..35: note = Synthetic oligonucleotide
  source 1..35: mol_type = other DNA
cattgcgaactagctttcttctccttctagctttt

SEQ ID NO: 700 - DNA, 35 bp, synthetic construct
  misc_feature 1..35: note = Synthetic oligonucleotide
  source 1..35: mol_type = other DNA
catgccctagaacattgctttaacactttcgcttt

SEQ ID NO: 701 - DNA, 38 bp, synthetic construct
  misc_feature 1..38: note = Synthetic oligonucleotide
  source 1..38: mol_type = other DNA
tcatgcgatcaatcgctctgcgtgcctagatcgattga

SEQ ID NO: 702 - DNA, 34 bp, synthetic construct
  misc_feature 1..34: note = Synthetic oligonucleotide
  source 1..34: mol_type = other DNA
gcgaccgtggcttcctacctccaagctttccgac

SEQ ID NO: 703 - DNA, 36 bp, synthetic construct
  misc_feature 1..36: note = Synthetic oligonucleotide
  source 1..36: mol_type = other DNA
gcgtgctaacgtactagaccaaagcgagtaacatca

SEQ ID NO: 704 - DNA, 37 bp, synthetic construct
  misc_feature 1..37: note = Synthetic oligonucleotide
  source 1..37: mol_type = other DNA
tcacgcgcgcttgggattacgtacaatcatcaatgga

SEQ ID NO: 705 - DNA, 36 bp, synthetic construct
  misc_feature 1..36: note = Synthetic oligonucleotide
  source 1..36: mol_type = other DNA
gcactacaccctattcccgcgtaggtccccgagcct

SEQ ID NO: 706 - DNA, 36 bp, synthetic construct
  misc_feature 1..36: note = Synthetic oligonucleotide
  source 1..36: mol_type = other DNA
taactccactgtgcgatcattgtttttcttttttga

SEQ ID NO: 707 - DNA, 35 bp, synthetic construct
  misc_feature 1..35: note = Synthetic oligonucleotide
  source 1..35: mol_type = other DNA
atcgtagtactggtactcctgccctatttcgataa

SEQ ID NO: 708 - DNA, 35 bp, synthetic construct
  misc_feature 1..35: note = Synthetic oligonucleotide
  source 1..35: mol_type = other DNA
acactctgcagcctagaactctaccgtgctaattt

SEQ ID NO: 709 - DNA, 35 bp, synthetic construct
  misc_feature 1..35: note = Synthetic oligonucleotide
  source 1..35: mol_type = other DNA
gtgcgcgcgctagcatgcgtaatcatgtcatttaa

SEQ ID NO: 710 - DNA, 35 bp, synthetic construct
  misc_feature 1..35: note = Synthetic oligonucleotide
  source 1..35: mol_type = other DNA
tcaatctcaactgtgcttccctggtttttagtttc

SEQ ID NO: 711 - DNA, 38 bp, synthetic construct
  misc_feature 1..38: note = Synthetic oligonucleotide
  source 1..38: mol_type = other DNA
gtcctgcgtgctaaggaccctaagcttcatgcgtatga

SEQ ID NO: 712 - DNA, 36 bp, synthetic construct
  misc_feature 1..36: note = Synthetic oligonucleotide
  source 1..36: mol_type = other DNA
tcgccgcccaaggatccctctactgtgccactttaa

SEQ ID NO: 713 - DNA, 35 bp, synthetic construct
  misc_feature 1..35: note = Synthetic oligonucleotide
  source 1..35: mol_type = other DNA
gcgtgcctacgtaacgttcatgcggatggaccgat

SEQ ID NO: 714 - DNA, 35 bp, synthetic construct
  misc_feature 1..35: note = Synthetic oligonucleotide
  source 1..35: mol_type = other DNA
cgtgccttggccggaccagtccttttgatcactac

SEQ ID NO: 715 - DNA, 35 bp, synthetic construct
  misc_feature 1..35: note = Synthetic oligonucleotide
  source 1..35: mol_type = other DNA
caggcatgacgatttggcttaacttcccttgctta

SEQ ID NO: 716 - DNA, 35 bp, synthetic construct
  misc_feature 1..35: note = Synthetic oligonucleotide
  source 1..35: mol_type = other DNA
tatgcgtatccaatcgcttttcaattcctatgctt

SEQ ID NO: 717 - DNA, 35 bp, synthetic construct
  misc_feature 1..35: note = Synthetic oligonucleotide
  source 1..35: mol_type = other DNA
ccgcgtgccaggcgtaatgtaggcaggccctttat

SEQ ID NO: 718 - DNA, 35 bp, synthetic construct
  misc_feature 1..35: note = Synthetic oligonucleotide
  source 1..35: mol_type = other DNA
gctaacagcagtcattgaatcctgtacgctccaaa

SEQ ID NO: 719 - DNA, 35 bp, synthetic construct
  misc_feature 1..35: note = Synthetic oligonucleotide
  source 1..35: mol_type = other DNA
atcgcctgcgccaggactggggtgcagatcatgcg

SEQ ID NO: 720 - DNA, 37 bp, synthetic construct
  misc_feature 1..37: note = Synthetic oligonucleotide
  source 1..37: mol_type = other DNA
ctgagcagtcaccattctttatctctactgtgctcga

SEQ ID NO: 721 - DNA, 35 bp, synthetic construct
  misc_feature 1..35: note = Synthetic oligonucleotide
  source 1..35: mol_type = other DNA
acccacatcctgcgtgctaaggacggtggggccgg

SEQ ID NO: 722 - DNA, 36 bp, synthetic construct
  misc_feature 1..36: note = Synthetic oligonucleotide
  source 1..36: mol_type = other DNA
ccggacctaggaatcgactcaggcgtggtagaacaa

SEQ ID NO: 723 - DNA, 35 bp, synthetic construct
  misc_feature 1..35: note = Synthetic oligonucleotide
  source 1..35: mol_type = other DNA
tcatggccactaaactcgccccataaaaccttgtc

SEQ ID NO: 724 - DNA, 35 bp, synthetic construct
  misc_feature 1..35: note = Synthetic oligonucleotide
  source 1..35: mol_type = other DNA
gactctactgtgcccgtttgttgttcttcccgaac

SEQ ID NO: 725 - DNA, 36 bp, synthetic construct
  misc_feature 1..36: note = Synthetic oligonucleotide
  source 1..36: mol_type = other DNA
ggagccgggcctgccacgtagctcggaaaatgcgga

SEQ ID NO: 726 - DNA, 37 bp, synthetic construct
  misc_feature 1..37: note = Synthetic oligonucleotide
  source 1..37: mol_type = other DNA
gatttcactagctctctactgtgcccatttctgttga

SEQ ID NO: 727 - DNA, 35 bp, synthetic construct
  misc_feature 1..35: note = Synthetic oligonucleotide
  source 1..35: mol_type = other DNA
agcggatctagccagtatgcactcatgtcactttt

SEQ ID NO: 728 - DNA, 35 bp, synthetic construct
  misc_feature 1..35: note = Synthetic oligonucleotide
  source 1..35: mol_type = other DNA
actgcacgtgcgcgcttaagttttcgcttctcttt

SEQ ID NO: 729 - DNA, 38 bp, synthetic construct
  misc_feature 1..38: note = Synthetic oligonucleotide
  source 1..38: mol_type = other DNA
gtcgaggggaactcctctgaggctcaacacatatctga

SEQ ID NO: 730 - DNA, 35 bp, synthetic construct
  misc_feature 1..35: note = Synthetic oligonucleotide
  source 1..35: mol_type = other DNA
gcgatccggttaaactacacactctactgtgcgaa

SEQ ID NO: 731 - DNA, 35 bp, synthetic construct
  misc_feature 1..35: note = Synthetic oligonucleotide
  source 1..35: mol_type = other DNA
gctaaccaaggaatgcgctgccttagacagaattg

SEQ ID NO: 732 - DNA, 35 bp, synthetic construct
  misc_feature 1..35: note = Synthetic oligonucleotide
  source 1..35: mol_type = other DNA
tcacctaccagggcgtggtaggtttttctctctac

SEQ ID NO: 733 - DNA, 37 bp, synthetic construct
  misc_feature 1..37: note = Synthetic oligonucleotide
  source 1..37: mol_type = other DNA
cctcgcgtgccagggacctagtgcaatctatccgaga

SEQ ID NO: 734 - DNA, 38 bp, synthetic construct
  misc_feature 1..38: note = Synthetic oligonucleotide
  source 1..38: mol_type = other DNA
ccgagcgaacgtacggaaagtgcgtactttatctttga

SEQ ID NO: 735 - DNA, 36 bp, synthetic construct
  misc_feature 1..36: note = Synthetic oligonucleotide
  source 1..36: mol_type = other DNA
agtacgtgaccactactttccctcctttgtacttga

SEQ ID NO: 736 - DNA, 38 bp, synthetic construct
  misc_feature 1..38: note = Synthetic oligonucleotide
  source 1..38: mol_type = other DNA
tcatgcggttgattggtctactcatgtttcttaattga

SEQ ID NO: 737 - DNA, 36 bp, synthetic construct
  misc_feature 1..36: note = Synthetic oligonucleotide
  source 1..36: mol_type = other DNA
gcacaatcccacgcttcctattataccacgattcta

SEQ ID NO: 738 - DNA, 35 bp, synthetic construct
  misc_feature 1..35: note = Synthetic oligonucleotide
  source 1..35: mol_type = other DNA
acaacccggcgcgccacggggtgatcgacaactgt

SEQ ID NO: 739 - DNA, 35 bp, synthetic construct
  misc_feature 1..35: note = Synthetic oligonucleotide
  source 1..35: mol_type = other DNA
gatcgtccgcgtgcctggcaacgatacccgacaag

SEQ ID NO: 740 - DNA, 35 bp, synthetic construct
  misc_feature 1..35: note = Synthetic oligonucleotide
  source 1..35: mol_type = other DNA
gcgtgtctctctactgtgcgcctcattcttatata

SEQ ID NO: 741 - DNA, 35 bp, synthetic construct
  misc_feature 1..35: note = Synthetic oligonucleotide
  source 1..35: mol_type = other DNA
tcgtagtacacgcagtcgacaaacaagctagtatt

SEQ ID NO: 742 - DNA, 36 bp, synthetic construct
  misc_feature 1..36: note = Synthetic oligonucleotide
  source 1..36: mol_type = other DNA
ttacctaccaacgtaatgcgctacaaccagagagta

SEQ ID NO: 743 - DNA, 35 bp, synthetic construct
  misc_feature 1..35: note = Synthetic oligonucleotide
  source 1..35: mol_type = other DNA
ttagcgaaactagcgtacgacaaggtccaatgtaa

SEQ ID NO: 744 - DNA, 36 bp, synthetic construct
  misc_feature 1..36: note = Synthetic oligonucleotide
  source 1..36: mol_type = other DNA
tgggcggatctagcaaaaacggacgcctcctgcgaa

SEQ ID NO: 745 - DNA, 35 bp, synthetic construct
  misc_feature 1..35: note = Synthetic oligonucleotide
  source 1..35: mol_type = other DNA
aagcacgggacgcatgtcgtggctacctgaattct

SEQ ID NO: 746 - DNA, 38 bp, synthetic construct
  misc_feature 1..38: note = Synthetic oligonucleotide
  source 1..38: mol_type = other DNA
gtgtgcaggcatgacgataagctttctaactcctatga

SEQ ID NO: 747 - DNA, 35 bp, synthetic construct
  misc_feature 1..35: note = Synthetic oligonucleotide
  source 1..35: mol_type = other DNA
tctgcgcgcctagaagtacgcaatcaccacgcgac

SEQ ID NO: 748 - DNA, 38 bp, synthetic construct
  misc_feature 1..38: note = Synthetic oligonucleotide
  source 1..38: mol_type = other DNA
atgtcgctgcaggtgcgtgcaagctttaatctccttga

SEQ ID NO: 749 - DNA, 37 bp, synthetic construct
  misc_feature 1..37: note = Synthetic oligonucleotide
  source 1..37: mol_type = other DNA
tccgggcctaggaacggtcactagggaatgcccctga

SEQ ID NO: 750 - DNA, 36 bp, synthetic construct
  misc_feature 1..36: note = Synthetic oligonucleotide
  source 1..36: mol_type = other DNA
acgtagtgcacatcctagactccactgtgcctctta

SEQ ID NO: 751 - DNA, 35 bp, synthetic construct
  misc_feature 1..35: note = Synthetic oligonucleotide
  source 1..35: mol_type = other DNA
tcatgcataggcttatatgacaccatcgcttcttt

SEQ ID NO: 752 - DNA, 36 bp, synthetic construct
  misc_feature 1..36: note = Synthetic oligonucleotide
  source 1..36: mol_type = other DNA
actgccggctgcaagcttttaggtacacttgattca

SEQ ID NO: 753 - DNA, 38 bp, synthetic construct
  misc_feature 1..38: note = Synthetic oligonucleotide
  source 1..38: mol_type = other DNA
cacgcgccgctttttcgcctatacgctttttattttga

SEQ ID NO: 754 - DNA, 37 bp, synthetic construct
  misc_feature 1..37: note = Synthetic oligonucleotide
  source 1..37: mol_type = other DNA
tctgactgcacgcatgggaccgcttaccactaaccga

SEQ ID NO: 755 - DNA, 36 bp, synthetic construct
  misc_feature 1..36: note = Synthetic oligonucleotide
  source 1..36: mol_type = other DNA
tgcgggactagcataagttccacatgcgaagacaaa

SEQ ID NO: 756 - DNA, 35 bp, synthetic construct
  misc_feature 1..35: note = Synthetic oligonucleotide
  source 1..35: mol_type = other DNA
gcgtgcctacgtacaggcggatatgcgcgtttccc

SEQ ID NO: 757 - DNA, 38 bp, synthetic construct
  misc_feature 1..38: note = Synthetic oligonucleotide
  source 1..38: mol_type = other DNA
gcagtcgcgtatcgattcgctttcttatctggttatga

SEQ ID NO: 758 - DNA, 38 bp, synthetic construct
  misc_feature 1..38: note = Synthetic oligonucleotide
  source 1..38: mol_type = other DNA
cgcaggcatgcaggcttttagtttaattactcctttga

SEQ ID NO: 759 - DNA, 36 bp, synthetic construct
  misc_feature 1..36: note = Synthetic oligonucleotide
  source 1..36: mol_type = other DNA
gacactccagcactaaagctagtgtggtatcactta

SEQ ID NO: 760 - DNA, 38 bp, synthetic construct
  misc_feature 1..38: note = Synthetic oligonucleotide
  source 1..38: mol_type = other DNA
cactgcgcttctagtactacctccactgtgctttttga

SEQ ID NO: 761 - DNA, 35 bp, synthetic construct
  misc_feature 1..35: note = Synthetic oligonucleotide
  source 1..35: mol_type = other DNA
acacatgccgcttaatattgattcgcttttatcat

SEQ ID NO: 762 - DNA, 35 bp, synthetic construct
  misc_feature 1..35: note = Synthetic oligonucleotide
  source 1..35: mol_type = other DNA
gagtagccaaacgcgtgcttggtggcgatcacgta

SEQ ID NO: 763 - DNA, 35 bp, synthetic construct
  misc_feature 1..35: note = Synthetic oligonucleotide
  source 1..35: mol_type = other DNA
tactaaggaaagcggtaaaacgtacactgaaatct

SEQ ID NO: 764 - DNA, 35 bp, synthetic construct
  misc_feature 1..35: note = Synthetic oligonucleotide
  source 1..35: mol_type = other DNA
ggtggtgcgaaaaatgcggtgtgaactcccctgaa

SEQ ID NO: 765 - DNA, 35 bp, synthetic construct
  misc_feature 1..35: note = Synthetic oligonucleotide
  source 1..35: mol_type = other DNA
tatcgcgagccaggagacgtaaaaaggaaatgcgg

SEQ ID NO: 766 - DNA, 35 bp, synthetic construct
  misc_feature 1..35: note = Synthetic oligonucleotide
  source 1..35: mol_type = other DNA
ggccaccgaccactatgcatcgtgtcatgacgtaa

SEQ ID NO: 767 - DNA, 36 bp, synthetic construct
  misc_feature 1..36: note = Synthetic oligonucleotide
  source 1..36: mol_type = other DNA
atccgatctctaccgtgcaacccacccctttgttta

SEQ ID NO: 768 - DNA, 37 bp, synthetic construct
  misc_feature 1..37: note = Synthetic oligonucleotide
  source 1..37: mol_type = other DNA
gcggtcgatcctctcaactgtgcactttttactacga

SEQ ID NO: 769 - DNA, 37 bp, synthetic construct
  misc_feature 1..37: note = Synthetic oligonucleotide
  source 1..37: mol_type = other DNA
attcgtagctcaactctactgtgcattttttgtttga

SEQ ID NO: 770 - DNA, 37 bp, synthetic construct
  misc_feature 1..37: note = Synthetic oligonucleotide
  source 1..37: mol_type = other DNA
gccgctaaactgtctccactgtgctaccttatcttga

SEQ ID NO: 771 - DNA, 35 bp, synthetic construct
  misc_feature 1..35: note = Synthetic oligonucleotide
  source 1..35: mol_type = other DNA
cgcgtgcttgcgtactgtccgcgtaatcacacaca

SEQ ID NO: 772 - DNA, 36 bp, synthetic construct
  misc_feature 1..36: note = Synthetic oligonucleotide
  source 1..36: mol_type = other DNA
tctccactgtgccgtttcctccgttcttactcctaa

SEQ ID NO: 773 - DNA, 35 bp, synthetic construct
  misc_feature 1..35: note = Synthetic oligonucleotide
  source 1..35: mol_type = other DNA
acctgcgtgctaaggaacgtagcattcgtgtgcga

SEQ ID NO: 774 - DNA, 35 bp, synthetic construct
  misc_feature 1..35: note = Synthetic oligonucleotide
  source 1..35: mol_type = other DNA
acacgcgcgcttgggactgaactcagcaatgcacc

SEQ ID NO: 775 - DNA, 35 bp, synthetic construct
  misc_feature 1..35: note = Synthetic oligonucleotide
  source 1..35: mol_type = other DNA
tcacctactaacgtgtgcggggtttttacatcact

SEQ ID NO: 776 - DNA, 36 bp, synthetic construct
  misc_feature 1..36: note = Synthetic oligonucleotide
  source 1..36: mol_type = other DNA
gatagccgcttagccaacacaaccgcttttgattca

SEQ ID NO: 777 - DNA, 35 bp, synthetic construct
  misc_feature 1..35: note = Synthetic oligonucleotide
  source 1..35: mol_type = other DNA
gcggccttgcatcgattcaactcgccctatttcaa

SEQ ID NO: 778 - DNA, 35 bp, synthetic construct
  misc_feature 1..35: note = Synthetic oligonucleotide
  source 1..35: mol_type = other DNA
agcgcatcgtagccgtacagcaatgtaatattctc

SEQ ID NO: 779 - DNA, 35 bp, synthetic construct
  misc_feature 1..35: note = Synthetic oligonucleotide
  source 1..35: mol_type = other DNA
gctaactgcaggccaccacgcttgccctggctacc

SEQ ID NO: 780 - DNA, 35 bp, synthetic construct
  misc_feature 1..35: note = Synthetic oligonucleotide
  source 1..35: mol_type = other DNA
aagcactgtgccgcagatatgcgatttttgtgatt

SEQ ID NO: 781 - DNA, 38 bp, synthetic construct
  misc_feature 1..38: note = Synthetic oligonucleotide
  source 1..38: mol_type = other DNA
tgagccgcgcgcctggccacgacgattcatgtgattga

SEQ ID NO: 782 - DNA, 37 bp, synthetic construct
  misc_feature 1..37: note = Synthetic oligonucleotide
  source 1..37: mol_type = other DNA
catgcgtaagcttatgtttcgattacgttcccattga

SEQ ID NO: 783 - DNA, 35 bp, synthetic construct
  misc_feature 1..35: note = Synthetic oligonucleotide
  source 1..35: mol_type = other DNA
gtggtccgcgcgaaccaccatgggtgcaggcgaat

SEQ ID NO: 784 - DNA, 35 bp, synthetic construct
  misc_feature 1..35: note = Synthetic oligonucleotide
  source 1..35: mol_type = other DNA
tcacctaccagggaaatgtccagccaccccgagct

SEQ ID NO: 785 - DNA, 35 bp, synthetic construct
  misc_feature 1..35: note = Synthetic oligonucleotide
  source 1..35: mol_type = other DNA
gcagggcttgcaggcttttaattgtttcactatcg

SEQ ID NO: 786 - DNA, 36 bp, synthetic construct
  misc_feature 1..36: note = Synthetic oligonucleotide
  source 1..36: mol_type = other DNA
gctaagtgcggtcactgccccaggagcttgatgcta

SEQ ID NO: 787 - DNA, 35 bp, synthetic construct
  misc_feature 1..35: note = Synthetic oligonucleotide
  source 1..35: mol_type = other DNA
gtgcgggactagcacgcagtacagctttctgcgtc

SEQ ID NO: 788 - DNA, 35 bp, synthetic construct
  misc_feature 1..35: note = Synthetic oligonucleotide
  source 1..35: mol_type = other DNA
gcgggactagcgagtttagcctgatactacattga

SEQ ID NO: 789 - DNA, 37 bp, synthetic construct
  misc_feature 1..37: note = Synthetic oligonucleotide
  source 1..37: mol_type = other DNA
gcggacgattcctgttcctttgcttatttctctgaga

SEQ ID NO: 790 - DNA, 35 bp, synthetic construct
  misc_feature 1..35: note = Synthetic oligonucleotide
  source 1..35: mol_type = other DNA
acacggacctagggtcgtactgcaggaagttgttc

SEQ ID NO: 791 - DNA, 37 bp, synthetic construct
  misc_feature 1..37: note = Synthetic oligonucleotide
  source 1..37: mol_type = other DNA
actccactgtgcctctttaacttctttccatatatga

SEQ ID NO: 792 - DNA, 35 bp, synthetic construct
  misc_feature 1..35: note = Synthetic oligonucleotide
  source 1..35: mol_type = other DNA
gcgtgcctacgacgccaggcactagtttagtaaac

SEQ ID NO: 793 - DNA, 38 bp, synthetic construct
  misc_feature 1..38: note = Synthetic oligonucleotide
  source 1..38: mol_type = other DNA
aagcggggagcaacgtactgccatttactattccatga

SEQ ID NO: 794 - DNA, 35 bp, synthetic construct
  misc_feature 1..35: note = Synthetic oligonucleotide
  source 1..35: mol_type = other DNA
tttaacggaacgacctgtggctgcacgtttctcca

SEQ ID NO: 795 - DNA, 35 bp, synthetic construct
  misc_feature 1..35: note = Synthetic oligonucleotide
  source 1..35: mol_type = other DNA
tttgtactgagcaagcgtacataccgaagccccgt

SEQ ID NO: 796 - DNA, 35 bp, synthetic construct
  misc_feature 1..35: note = Synthetic oligonucleotide
  source 1..35: mol_type = other DNA
catgcgcgattagcttgttctaccaccgctttaca

SEQ ID NO: 797 - DNA, 38 bp, synthetic construct
  misc_feature 1..38: note = Synthetic oligonucleotide
  source 1..38: mol_type = other DNA
catgtcgacctctttgtaaactcgccctattttcctga

SEQ ID NO: 798 - DNA, 35 bp, synthetic construct
  misc_feature 1..35: note = Synthetic oligonucleotide
  source 1..35: mol_type = other DNA
cattgcgcgctttcaataacctccgcttataacac

SEQ ID NO: 799 - DNA, 35 bp, synthetic construct
  misc_feature 1..35: note = Synthetic oligonucleotide
  source 1..35: mol_type = other DNA
catctagaggctcattcatattaacacgctttcct

SEQ ID NO: 800 - DNA, 37 bp, synthetic construct
  misc_feature 1..37: note = Synthetic oligonucleotide
  source 1..37: mol_type = other DNA
tcgtagtgctgcaagtccttagtaccttggatcttga

SEQ ID NO: 801 - DNA, 35 bp, synthetic construct
  misc_feature 1..35: note = Synthetic oligonucleotide
  source 1..35: mol_type = other DNA
atgcacggttctgctcaggccatcattttcttcac

SEQ ID NO: 802 - DNA, 35 bp, synthetic construct
  misc_feature 1..35: note = Synthetic oligonucleotide
  source 1..35: mol_type = other DNA
gcgcgcctacgttaatgcacttcgtgacatcttcc

SEQ ID NO: 803 - DNA, 35 bp, synthetic construct
  misc_feature 1..35: note = Synthetic oligonucleotide
  source 1..35: mol_type = other DNA
ccggtcgtagggtgactgcgggcataagctgggtt

SEQ ID NO: 804 - DNA, 35 bp, synthetic construct
  misc_feature 1..35: note = Synthetic oligonucleotide
  source 1..35: mol_type = other DNA
tgcgcaggcccgttgtactcgctcactgctagatt

SEQ ID NO: 805 - DNA, 36 bp, synthetic construct
  misc_feature 1..36: note = Synthetic oligonucleotide
  source 1..36: mol_type = other DNA
aagcacggacaagcatgtatgcgatcacgcccttta

SEQ ID NO: 806 - DNA, 35 bp, synthetic construct
  misc_feature 1..35: note = Synthetic oligonucleotide
  source 1..35: mol_type = other DNA
gactgcgggactagcaacgtactgtggctggcgat

SEQ ID NO: 807 - DNA, 35 bp, synthetic construct
  misc_feature 1..35: note = Synthetic oligonucleotide
  source 1..35: mol_type = other DNA
gcctccgtaacctacccgcgtgcctgggggttacc

SEQ ID NO: 808 - DNA, 35 bp, synthetic construct
  misc_feature 1..35: note = Synthetic oligonucleotide
  source 1..35: mol_type = other DNA
gcagggaatccagcgaccgttcctctaccgtgcct

SEQ ID NO: 809 - DNA, 38 bp, synthetic construct
  misc_feature 1..38: note = Synthetic oligonucleotide
  source 1..38: mol_type = other DNA
catgcggaagctttctctgttgatgatgaaccctttga

SEQ ID NO: 810 - DNA, 35 bp, synthetic construct
  misc_feature 1..35: note = Synthetic oligonucleotide
  source 1..35: mol_type = other DNA
actgcgctaatgcccgcttaacctccatgattgtt

SEQ ID NO: 811 - DNA, 35 bp, synthetic construct
  misc_feature 1..35: note = Synthetic oligonucleotide
  source 1..35: mol_type = other DNA
ggggtcgcgtgccagaccacgactcatgtctgtgc

SEQ ID NO: 812 - DNA, 35 bp, synthetic construct
  misc_feature 1..35: note = Synthetic oligonucleotide
  source 1..35: mol_type = other DNA
atcgtagaactgcagacccgcatggctacctttgt

SEQ ID NO: 813 - DNA, 36 bp, synthetic construct
  misc_feature 1..36: note = Synthetic oligonucleotide
  source 1..36: mol_type = other DNA
attgcggatcgtagctctaactgcgcatgcggtaca

SEQ ID NO: 814 - DNA, 35 bp, synthetic construct
  misc_feature 1..35: note = Synthetic oligonucleotide
  source 1..35: mol_type = other DNA
tacacaccgctttactatcctcaatttcgctttcc

SEQ ID NO: 815 - DNA, 35 bp, synthetic construct
  misc_feature 1..35: note = Synthetic oligonucleotide
  source 1..35: mol_type = other DNA
tgcctctactgtgccgataccggtttctttatatt

SEQ ID NO: 816 - DNA, 36 bp, synthetic construct
  misc_feature 1..36: note = Synthetic oligonucleotide
  source 1..36: mol_type = other DNA
tcccgcgcgctagggtaatgatccagcagacatgta

SEQ ID NO: 817 - DNA, 36 bp, synthetic construct
  misc_feature 1..36: note = Synthetic oligonucleotide
  source 1..36: mol_type = other DNA
tcgtagtactcgcgcttcccgtatcacaattttgaa

SEQ ID NO: 818 - DNA, 37 bp, synthetic construct
  misc_feature 1..37: note = Synthetic oligonucleotide
  source 1..37: mol_type = other DNA
aggtcgcgcgccagggacgtgctgcagaaccacctga

SEQ ID NO: 819 - DNA, 36 bp, synthetic construct
  misc_feature 1..36: note = Synthetic oligonucleotide
  source 1..36: mol_type = other DNA
tctaccgcgcgcttggaggaacgttccggactggca

SEQ ID NO: 820 - DNA, 35 bp, synthetic construct
  misc_feature 1..35: note = Synthetic oligonucleotide
  source 1..35: mol_type = other DNA
gcaaaataataccgctacattctctacaactcgcc

SEQ ID NO: 821 - DNA, 36 bp, synthetic construct
  misc_feature 1..36: note = Synthetic oligonucleotide
  source 1..36: mol_type = other DNA
gcgtggggtgcgcgctaaccacacttgaccagacta

SEQ ID NO: 822 - DNA, 35 bp, synthetic construct
  misc_feature 1..35: note = Synthetic oligonucleotide
  source 1..35: mol_type = other DNA
cccggcgagccacgggctgtacgagcaagtcacac

SEQ ID NO: 823 - DNA, 36 bp, synthetic construct
  misc_feature 1..36: note = Synthetic oligonucleotide
  source 1..36: mol_type = other DNA
gcgaggaccatcccgcgtgcctgggagtcactttaa

SEQ ID NO: 824 - DNA, 38 bp, synthetic construct
  misc_feature 1..38: note = Synthetic oligonucleotide
  source 1..38: mol_type = other DNA
atgcacggatgcggctagcgatctcccctaaacactga

SEQ ID NO: 825 - DNA, 37 bp, synthetic construct
  misc_feature 1..37: note = Synthetic oligonucleotide
  source 1..37: mol_type = other DNA
atgcactgtacgtagagtaatgcggttcattccttga

SEQ ID NO: 826 - DNA, 35 bp, synthetic construct
  misc_feature 1..35: note = Synthetic oligonucleotide
  source 1..35: mol_type = other DNA
gatcgtaacgctgcaaggtcactccgggaaaacca

SEQ ID NO: 827 - DNA, 38 bp, synthetic construct
  misc_feature 1..38: note = Synthetic oligonucleotide
  source 1..38: mol_type = other DNA
cctgcgcgctaggggagatactggttcgtgcgatttga

SEQ ID NO: 828 - DNA, 35 bp, synthetic construct
  misc_feature 1..35: note = Synthetic oligonucleotide
  source 1..35: mol_type = other DNA
acgcgtgctaggacggactgaacggtaaaactaag

SEQ ID NO: 829 - DNA, 38 bp, synthetic construct
  misc_feature 1..38: note = Synthetic oligonucleotide
  source 1..38: mol_type = other DNA
actgcagagtatgcaagcttgaccaccatacgctttga

SEQ ID NO: 830 - DNA, 37 bp, synthetic construct
  misc_feature 1..37: note = Synthetic oligonucleotide
  source 1..37: mol_type = other DNA
catgcgcaggctttctctttagttctcttctggttga

SEQ ID NO: 831 - DNA, 35 bp, synthetic construct
  misc_feature 1..35: note = Synthetic oligonucleotide
  source 1..35: mol_type = other DNA
tcaagcgaatctagcggtacacctcgcaggctcgc

SEQ ID NO: 832 - DNA, 35 bp, synthetic construct
  misc_feature 1..35: note = Synthetic oligonucleotide
  source 1..35: mol_type = other DNA
catgcaagcttcgttcaacatccaacctagctgta

SEQ ID NO: 833 - DNA, 35 bp, synthetic construct
  misc_feature 1..35: note = Synthetic oligonucleotide
  source 1..35: mol_type = other DNA
gcgtgccaacgttgcatcaactattttcatgaatt

SEQ ID NO: 834 - DNA, 38 bp, synthetic construct
  misc_feature 1..38: note = Synthetic oligonucleotide
  source 1..38: mol_type = other DNA
gcgtgctgtgactccaccgtgccttatactttgaatga

SEQ ID NO: 835 - DNA, 36 bp, synthetic construct
  misc_feature 1..36: note = Synthetic oligonucleotide
  source 1..36: mol_type = other DNA
catgcgcaagcttcaacgacacaactaaacctgcta

SEQ ID NO: 836 - DNA, 36 bp, synthetic construct
  misc_feature 1..36: note = Synthetic oligonucleotide
  source 1..36: mol_type = other DNA
ggctgaccacgatgaagtttgcgcaagcttttatta

SEQ ID NO: 837 - DNA, 37 bp, synthetic construct
  misc_feature 1..37: note = Synthetic oligonucleotide
  source 1..37: mol_type = other DNA
aacgcgagcctgtacggtactgcccctatcccaccga

SEQ ID NO: 838 - DNA, 35 bp, synthetic construct
  misc_feature 1..35: note = Synthetic oligonucleotide
  source 1..35: mol_type = other DNA
gcgggcctacgactgcaggacccctgacccattct

SEQ ID NO: 839 - DNA, 36 bp, synthetic construct
  misc_feature 1..36: note = Synthetic oligonucleotide
  source 1..36: mol_type = other DNA
gctaactgcgtgtcatttcggtttcctacatccata

SEQ ID NO: 840 - DNA, 36 bp, synthetic construct
  misc_feature 1..36: note = Synthetic oligonucleotide
  source 1..36: mol_type = other DNA
ccggatctaggagagtactggctgcacatgcgacaa

SEQ ID NO: 841 - DNA, 36 bp, synthetic construct
  misc_feature 1..36: note = Synthetic oligonucleotide
  source 1..36: mol_type = other DNA
tacgcgcgactaacattaatgcggtcttatcatcca

SEQ ID NO: 842 - DNA, 38 bp, synthetic construct
  misc_feature 1..38: note = Synthetic oligonucleotide
  source 1..38: mol_type = other DNA
cgccgcgccagggtactgcaggaagcgctacgacttga

SEQ ID NO: 843 - DNA, 35 bp, synthetic construct
  misc_feature 1..35: note = Synthetic oligonucleotide
  source 1..35: mol_type = other DNA
gcagtcagcaacgcttctttatgtcatacccgctt

SEQ ID NO: 844 - DNA, 35 bp, synthetic construct
  misc_feature 1..35: note = Synthetic oligonucleotide
  source 1..35: mol_type = other DNA
catgcgaaagcttctcatacttgatcacgtttccc

SEQ ID NO: 845 - DNA, 36 bp, synthetic construct
  misc_feature 1..36: note = Synthetic oligonucleotide
  source 1..36: mol_type = other DNA
cacgcggttcgtagcggaatgtactggtcaatccta

SEQ ID NO: 846 - DNA, 36 bp, synthetic construct
  misc_feature 1..36: note = Synthetic oligonucleotide
  source 1..36: mol_type = other DNA
ccggggctaggaacgggggcagtcagagcgaccata

SEQ ID NO: 847 - DNA, 35 bp, synthetic construct
  misc_feature 1..35: note = Synthetic oligonucleotide
  source 1..35: mol_type = other DNA
ccggcagtcttatctctactgtgccttctttaatc

SEQ ID NO: 848 - DNA, 38 bp, synthetic construct
  misc_feature 1..38: note = Synthetic oligonucleotide
  source 1..38: mol_type = other DNA
gagttgcgagcatgcggacgcttttgttttgcttttga

SEQ ID NO: 849 - DNA, 38 bp, synthetic construct
  misc_feature 1..38: note = Synthetic oligonucleotide
  source 1..38: mol_type = other DNA
tacgcaggagggccatgacgctgactatacgcttttga

SEQ ID NO: 850 - DNA, 38 bp, synthetic construct
  misc_feature 1..38: note = Synthetic oligonucleotide
  source 1..38: mol_type = other DNA
ttctgcgcaatttcaaccctctactgtgcccaatttga

SEQ ID NO: 851 - DNA, 35 bp, synthetic construct
  misc_feature 1..35: note = Synthetic oligonucleotide
  source 1..35: mol_type = other DNA
tcataccctcatgatcatgcagtcaccactcttag

SEQ ID NO: 852 - DNA, 38 bp, synthetic construct
  misc_feature 1..38: note = Synthetic oligonucleotide
  source 1..38: mol_type = other DNA
gcggagctagcacggtactgcgcataaactatgattga

SEQ ID NO: 853 - DNA, 35 bp, synthetic construct
  misc_feature 1..35: note = Synthetic oligonucleotide
  source 1..35: mol_type = other DNA
gaccggaactaggtacggctgcagagcgcaaccgc

SEQ ID NO: 854 - DNA, 38 bp, synthetic construct
  misc_feature 1..38: note = Synthetic oligonucleotide
  source 1..38: mol_type = other DNA
tcgtagtcaccgcgggtcatccactattaacaccttga

SEQ ID NO: 855 - DNA, 35 bp, synthetic construct
  misc_feature 1..35: note = Synthetic oligonucleotide
  source 1..35: mol_type = other DNA
acgcgacagctacgagtccccgcggagtgcaacgc

SEQ ID NO: 856 - DNA, 36 bp, synthetic construct
  misc_feature 1..36: note = Synthetic oligonucleotide
  source 1..36: mol_type = other DNA
tcacctactagggaaggccacacggcacgcacatta

SEQ ID NO: 857 - DNA, 37 bp, synthetic construct
  misc_feature 1..37: note = Synthetic oligonucleotide
  source 1..37: mol_type = other DNA
aaccggaactaggtgtgggacctgaaggcatggacga

SEQ ID NO: 858 - DNA, 37 bp, synthetic construct
  misc_feature 1..37: note = Synthetic oligonucleotide
  source 1..37: mol_type = other DNA
gtaaactgcgctcttcttcgccctcccctgtctcgga

SEQ ID NO: 859 - DNA, 35 bp, synthetic construct
  misc_feature 1..35: note = Synthetic oligonucleotide
  source 1..35: mol_type = other DNA
tcccatcgccggacgctccatatctttcggatcct

SEQ ID NO: 860 - DNA, 36 bp, synthetic construct
  misc_feature 1..36: note = Synthetic oligonucleotide
  source 1..36: mol_type = other DNA
tgcctctaccgtgccgtgttgattttctccattcta

SEQ ID NO: 861 - DNA, 38 bp, synthetic construct
  misc_feature 1..38: note = Synthetic oligonucleotide
  source 1..38: mol_type = other DNA
gcgggccgtgactgtttaccactctactgtgcgattga

SEQ ID NO: 862 - DNA, 35 bp, synthetic construct
  misc_feature 1..35: note = Synthetic oligonucleotide
  source 1..35: mol_type = other DNA
gcgatccatgacgaccaatatataccgctttgaca

SEQ ID NO: 863 - DNA, 36 bp, synthetic construct
  misc_feature 1..36: note = Synthetic oligonucleotide
  source 1..36: mol_type = other DNA
tgtactctctactgtgcccttcctgagtgtttatca

SEQ ID NO: 864 - DNA, 36 bp, synthetic construct
  misc_feature 1..36: note = Synthetic oligonucleotide
  source 1..36: mol_type = other DNA
taaggcgaaactagctgaaggtactgcgaattttta

SEQ ID NO: 865 - DNA, 37 bp, synthetic construct
  misc_feature 1..37: note = Synthetic oligonucleotide
  source 1..37: mol_type = other DNA
atgcacggtacggaaggattctgccttcccatcacga

SEQ ID NO: 866 - DNA, 36 bp, synthetic construct
  misc_feature 1..36: note = Synthetic oligonucleotide
  source 1..36: mol_type = other DNA
ggtcgcgtgccaggcacggagatgcggtcctttgca

SEQ ID NO: 867 - DNA, 35 bp, synthetic construct
  misc_feature 1..35: note = Synthetic oligonucleotide
  source 1..35: mol_type = other DNA
aacctgaaggaaccgcatctctaccgtgcctatat

SEQ ID NO: 868 - DNA, 35 bp, synthetic construct
  misc_feature 1..35: note = Synthetic oligonucleotide
  source 1..35: mol_type = other DNA
catgcaggctttccaacccactttaatagctaact

SEQ ID NO: 869 - DNA, 36 bp, synthetic construct
  misc_feature 1..36: note = Synthetic oligonucleotide
  source 1..36: mol_type = other DNA
tcatgccaggctttttctttgaattccgatttaata

SEQ ID NO: 870 - DNA, 36 bp, synthetic construct
  misc_feature 1..36: note = Synthetic oligonucleotide
  source 1..36: mol_type = other DNA
gcgttagatctctaccgtgctcaacctcttctgtaa

SEQ ID NO: 871 - DNA, 36 bp, synthetic construct
  misc_feature 1..36: note = Synthetic oligonucleotide
  source 1..36: mol_type = other DNA
gtgacgccgctatctttacaactctactgtgcttta

SEQ ID NO: 872 - DNA, 36 bp, synthetic construct
  misc_feature 1..36: note = Synthetic oligonucleotide
  source 1..36: mol_type = other DNA
tattgcgaactcctctgagctacggtacgtgtggca

SEQ ID NO: 873 - DNA, 35 bp, synthetic construct
  misc_feature 1..35: note = Synthetic oligonucleotide
  source 1..35: mol_type = other DNA
tctatcaactcgccccaaattacccgccccacata

SEQ ID NO: 874 - DNA, 35 bp, synthetic construct
  misc_feature 1..35: note = Synthetic oligonucleotide
  source 1..35: mol_type = other DNA
catgtctaggtctttcgtaatcctctaccgtgcca

SEQ ID NO: 875 - DNA, 36 bp, synthetic construct
  misc_feature 1..36: note = Synthetic oligonucleotide
  source 1..36: mol_type = other DNA
ctgcggtcagtgcccatccgctcccaactagcctta

SEQ ID NO: 876 - DNA, 38 bp, synthetic construct
  misc_feature 1..38: note = Synthetic oligonucleotide
  source 1..38: mol_type = other DNA
ccactccaccgtgcccttctataggttttctcaactga

SEQ ID NO: 877 - DNA, 35 bp, synthetic construct
  misc_feature 1..35: note = Synthetic oligonucleotide
  source 1..35: mol_type = other DNA
gccttcccacgtcgagtcagttcgacgtccccgtt

SEQ ID NO: 878 - DNA, 38 bp, synthetic construct
  misc_feature 1..38: note = Synthetic oligonucleotide
  source 1..38: mol_type = other DNA
tcatccttttactcgaccgtgccccccttagttcctga

SEQ ID NO: 879 - DNA, 36 bp, synthetic construct
  misc_feature 1..36: note = Synthetic oligonucleotide
  source 1..36: mol_type = other DNA
taaaggccacgcatcccccgttaaaacatcattaaa

SEQ ID NO: 880 - DNA, 36 bp, synthetic construct
  misc_feature 1..36: note = Synthetic oligonucleotide
  source 1..36: mol_type = other DNA
ttcttctccactgtgccccaactcaatttttgatta

SEQ ID NO: 881 - DNA, 36 bp, synthetic construct
  misc_feature 1..36: note = Synthetic oligonucleotide
  source 1..36: mol_type = other DNA
tctccaccgtgccatcgaaaatttactctctgctca

SEQ ID NO: 882 - DNA, 38 bp, synthetic construct
  misc_feature 1..38: note = Synthetic oligonucleotide
  source 1..38: mol_type = other DNA
taacctactaaggcatgtcgactctatcatatgcttga

SEQ ID NO: 883 - DNA, 36 bp, synthetic construct
  misc_feature 1..36: note = Synthetic oligonucleotide
  source 1..36: mol_type = other DNA
aaaggcatgacatatatcctctaccgtgcccgccta

SEQ ID NO: 884 - DNA, 36 bp, synthetic construct
  misc_feature 1..36: note = Synthetic oligonucleotide
  source 1..36: mol_type = other DNA
catgccagatttcgcactagttacctccttagctta

SEQ ID NO: 885 - DNA, 38 bp, synthetic construct
  misc_feature 1..38: note = Synthetic oligonucleotide
  source 1..38: mol_type = other DNA
catgccggagcgatttattcaatatcttctatgagtga

SEQ ID NO: 886 - DNA, 35 bp, synthetic construct
  misc_feature 1..35: note = Synthetic oligonucleotide
  source 1..35: mol_type = other DNA
atcgtagtacaaaagggggttatctcttggtttcg

SEQ ID NO: 887 - DNA, 35 bp, synthetic construct
  misc_feature 1..35: note = Synthetic oligonucleotide
  source 1..35: mol_type = other DNA
tagacatatcgttctggactttttctccactgtgc

SEQ ID NO: 888 - DNA, 37 bp, synthetic construct
  misc_feature 1..37: note = Synthetic oligonucleotide
  source 1..37: mol_type = other DNA
atcgtagtactgtggtccgccactacccgaactatga

SEQ ID NO: 889 - DNA, 37 bp, synthetic construct
  misc_feature 1..37: note = Synthetic oligonucleotide
  source 1..37: mol_type = other DNA
gaagagccccgcctgcttccttatccagatcatgcga

SEQ ID NO: 890 - DNA, 35 bp, synthetic construct
  misc_feature 1..35: note = Synthetic oligonucleotide
  source 1..35: mol_type = other DNA
gcgcgatacgacatctccttagcttttgttttgct

SEQ ID NO: 891 - DNA, 35 bp, synthetic construct
  misc_feature 1..35: note = Synthetic oligonucleotide
  source 1..35: mol_type = other DNA
gacgtcatggccaccctagcttcatttcttgcttt

SEQ ID NO: 892 - DNA, 38 bp, synthetic construct
  misc_feature 1..38: note = Synthetic oligonucleotide
  source 1..38: mol_type = other DNA
ccggtcgtaggactaccgccaggcatattattgtttga

SEQ ID NO: 893 - DNA, 36 bp, synthetic construct
  misc_feature 1..36: note = Synthetic oligonucleotide
  source 1..36: mol_type = other DNA
tgtggtagtacgcagtcagtcgctgtatcccgctaa

SEQ ID NO: 894 - DNA, 38 bp, synthetic construct
  misc_feature 1..38: note = Synthetic oligonucleotide
  source 1..38: mol_type = other DNA
tatgcgcccctggtctatattcggaaaaccctacctga

SEQ ID NO: 895 - DNA, 35 bp, synthetic construct
  misc_feature 1..35: note = Synthetic oligonucleotide
  source 1..35: mol_type = other DNA
ttaggtatcatgcggccacctggtctaatattttt

SEQ ID NO: 896 - DNA, 35 bp, synthetic construct
  misc_feature 1..35: note = Synthetic oligonucleotide
  source 1..35: mol_type = other DNA
tcgtagtactcagggccccaccaaatttcttaaat

SEQ ID NO: 897 - DNA, 35 bp, synthetic construct
  misc_feature 1..35: note = Synthetic oligonucleotide
  source 1..35: mol_type = other DNA
accgcgcgcctggtatcctgctatgtctagtccct

SEQ ID NO: 898 - DNA, 35 bp, synthetic construct
  misc_feature 1..35: note = Synthetic oligonucleotide
  source 1..35: mol_type = other DNA
gatcgtagcgtacgtaggaaatccccgaaacaacg

SEQ ID NO: 899 - DNA, 37 bp, synthetic construct
  misc_feature 1..37: note = Synthetic oligonucleotide
  source 1..37: mol_type = other DNA
cgtgccatggctttaaccgtatcttcgctttttctga

SEQ ID NO: 900 - DNA, 36 bp, synthetic construct
  misc_feature 1..36: note = Synthetic oligonucleotide
  source 1..36: mol_type = other DNA
gcgatcgtagcacggtaaactggcccccttgcaata

SEQ ID NO: 901 - DNA, 36 bp, synthetic construct
  misc_feature 1..36: note = Synthetic oligonucleotide
  source 1..36: mol_type = other DNA
acgcactgtataaagtctacgcgcccttcaaccata

SEQ ID NO: 902 - DNA, 38 bp, synthetic construct
  misc_feature 1..38: note = Synthetic oligonucleotide
  source 1..38: mol_type = other DNA
cttacgcgtgcttggaacgatgtattgcggccaattga

SEQ ID NO: 903 - DNA, 36 bp, synthetic construct
  misc_feature 1..36: note = Synthetic oligonucleotide
  source 1..36: mol_type = other DNA
tcgtaggactgcaaaccacacgccttgttcgaaaaa

SEQ ID NO: 904 - DNA, 35 bp, synthetic construct
  misc_feature 1..35: note = Synthetic oligonucleotide
  source 1..35: mol_type = other DNA
ccgggtctaggacggctctgttgtctcctccctgt

SEQ ID NO: 905 - DNA, 35 bp, synthetic construct
  misc_feature 1..35: note = Synthetic oligonucleotide
  source 1..35: mol_type = other DNA
atcgtagcactgcagggcgcctagtttacaatggg

SEQ ID NO: 906 - DNA, 35 bp, synthetic construct
  misc_feature 1..35: note = Synthetic oligonucleotide
  source 1..35: mol_type = other DNA
gacgtcatcgtgccttcttggctgaccgtacagga

SEQ ID NO: 907 - DNA, 38 bp, synthetic construct
  misc_feature 1..38: note = Synthetic oligonucleotide
  source 1..38: mol_type = other DNA
ttcatccgcgcgaatgaaaccgatctacatccctatga

SEQ ID NO: 908 - DNA, 35 bp, synthetic construct
  misc_feature 1..35: note = Synthetic oligonucleotide
  source 1..35: mol_type = other DNA
atcgtagtaccataccccgcatgccgccaaaattt

SEQ ID NO: 909 - DNA, 37 bp, synthetic construct
  misc_feature 1..37: note = Synthetic oligonucleotide
  source 1..37: mol_type = other DNA
aaacccgcgagcaggcattgaactcccctgaatacga

SEQ ID NO: 910 - DNA, 37 bp, synthetic construct
  misc_feature 1..37: note = Synthetic oligonucleotide
  source 1..37: mol_type = other DNA
gcaatgacgtgcgttcgaccgattatctctactatga

SEQ ID NO: 911 - DNA, 36 bp, synthetic construct
  misc_feature 1..36: note = Synthetic oligonucleotide
  source 1..36: mol_type = other DNA
aagcactgtacggaagtaggcccgcccccaaattaa

SEQ ID NO: 912 - DNA, 35 bp, synthetic construct
  misc_feature 1..35: note = Synthetic oligonucleotide
  source 1..35: mol_type = other DNA
tcgtagtatctggaggtcgtgcgttgcactattac

SEQ ID NO: 913 - DNA, 36 bp, synthetic construct
  misc_feature 1..36: note = Synthetic oligonucleotide
  source 1..36: mol_type = other DNA
gatcgtatacgtacgctaggtctctttcgcttatca

SEQ ID NO: 914 - DNA, 36 bp, synthetic construct
  misc_feature 1..36: note = Synthetic oligonucleotide
  source 1..36: mol_type = other DNA
tgggcaaccggaactagtacagcccacgtacgttga

SEQ ID NO: 915 - DNA, 36 bp, synthetic construct
  misc_feature 1..36: note = Synthetic oligonucleotide
  source 1..36: mol_type = other DNA
tcgcaaactcagcttcctctctaccgtgcatgttaa

SEQ ID NO: 916 - DNA, 38 bp, synthetic construct
  misc_feature 1..38: note = Synthetic oligonucleotide
  source 1..38: mol_type = other DNA
gcgcgctaacaccctgcggtacaccaggaactccttga

SEQ ID NO: 917 - DNA, 35 bp, synthetic construct
  misc_feature 1..35: note = Synthetic oligonucleotide
  source 1..35: mol_type = other DNA
ccggtcactgctggagtgcgaaagctttctcttgt

SEQ ID NO: 918 - DNA, 36 bp, synthetic construct
  misc_feature 1..36: note = Synthetic oligonucleotide
  source 1..36: mol_type = other DNA
gcagaaggaaatgcgcgctaattgacaacgctcgaa

SEQ ID NO: 919 - DNA, 38 bp, synthetic construct
  misc_feature 1..38: note = Synthetic oligonucleotide
  source 1..38: mol_type = other DNA
accgcgcgcctgggaccgtaatggatcctacataatga

SEQ ID NO: 920 - DNA, 36 bp, synthetic construct
  misc_feature 1..36: note = Synthetic oligonucleotide
  source 1..36: mol_type = other DNA
gcgatcgtagctaagggatctactagggaatgccca

SEQ ID NO: 921 - DNA, 35 bp, synthetic construct
  misc_feature 1..35: note = Synthetic oligonucleotide
  source 1..35: mol_type = other DNA
ttacctaccagggatgcggccccgaagccattctt

SEQ ID NO: 922 - DNA, 38 bp, synthetic construct
  misc_feature 1..38: note = Synthetic oligonucleotide
  source 1..38: mol_type = other DNA
taggcaactaatgcagagacgcgacccacgacatttga

SEQ ID NO: 923 - DNA, 35 bp, synthetic construct
  misc_feature 1..35: note = Synthetic oligonucleotide
  source 1..35: mol_type = other DNA
ctcctagcaggcgggccctgacaggcggtcgtagc

SEQ ID NO: 924 - DNA, 35 bp, synthetic construct
  misc_feature 1..35: note = Synthetic oligonucleotide
  source 1..35: mol_type = other DNA
tcacctaccacggtcatctttacttgagacaacaa

SEQ ID NO: 925 - DNA, 35 bp, synthetic construct
  misc_feature 1..35: note = Synthetic oligonucleotide
  source 1..35: mol_type = other DNA
taagcaactcctgccgtgccattaaagcttttata

SEQ ID NO: 926 - DNA, 36 bp, synthetic construct
  misc_feature 1..36: note = Synthetic oligonucleotide
  source 1..36: mol_type = other DNA
taccgctgccatgaatcatctctgttaaactagcca

SEQ ID NO: 927 - DNA, 37 bp, synthetic construct
  misc_feature 1..37: note = Synthetic oligonucleotide
  source 1..37: mol_type = other DNA
gagtacgcgacgccttggtctactactcttccctgga

SEQ ID NO: 928 - DNA, 35 bp, synthetic construct
  misc_feature 1..35: note = Synthetic oligonucleotide
  source 1..35: mol_type = other DNA
gcggtcgtagcaacactgcatcctcatgatactta

SEQ ID NO: 929 - DNA, 35 bp, synthetic construct
  misc_feature 1..35: note = Synthetic oligonucleotide
  source 1..35: mol_type = other DNA
tccgacggggcatcgtgtcaggcgcatgaaatttt

SEQ ID NO: 930 - DNA, 35 bp, synthetic construct
  misc_feature 1..35: note = Synthetic oligonucleotide
  source 1..35: mol_type = other DNA
atcgtagtagtgccgcgctagcctgacgcaaaatt

SEQ ID NO: 931 - DNA, 38 bp, synthetic construct
  misc_feature 1..38: note = Synthetic oligonucleotide
  source 1..38: mol_type = other DNA
aggcgtgcatgacgatttaattaaccaccgaaccatga

SEQ ID NO: 932 - DNA, 36 bp, synthetic construct
  misc_feature 1..36: note = Synthetic oligonucleotide
  source 1..36: mol_type = other DNA
catcatacgaccgcgtgattggtgagttgtaacgga

SEQ ID NO: 933 - DNA, 35 bp, synthetic construct
  misc_feature 1..35: note = Synthetic oligonucleotide
  source 1..35: mol_type = other DNA
catgcaagcttggattttctcacgtttcattgtta

SEQ ID NO: 934 - DNA, 35 bp, synthetic construct
  misc_feature 1..35: note = Synthetic oligonucleotide
  source 1..35: mol_type = other DNA
gcgcataggctttttatatttattctctatgcttt

SEQ ID NO: 935 - DNA, 35 bp, synthetic construct
  misc_feature 1..35: note = Synthetic oligonucleotide
  source 1..35: mol_type = other DNA
gcccgattccagaaaccacgcttttaccatttcct

SEQ ID NO: 936 - DNA, 37 bp, synthetic construct
  misc_feature 1..37: note = Synthetic oligonucleotide
  source 1..37: mol_type = other DNA
gctagcattggcttttgtttatttgcttctatcttga

SEQ ID NO: 937 - DNA, 35 bp, synthetic construct
  misc_feature 1..35: note = Synthetic oligonucleotide
  source 1..35: mol_type = other DNA
gcgctactagccgatatatttccgttccactcttt

SEQ ID NO: 938 - DNA, 36 bp, synthetic construct
  misc_feature 1..36: note = Synthetic oligonucleotide
  source 1..36: mol_type = other DNA
gactaaatacctcactatctccactgtgccgttaaa

SEQ ID NO: 939 - DNA, 35 bp, synthetic construct
  misc_feature 1..35: note = Synthetic oligonucleotide
  source 1..35: mol_type = other DNA
gcaaattctgttcgatccacactattaactcgctt

SEQ ID NO: 940 - DNA, 37 bp, synthetic construct
  misc_feature 1..37: note = Synthetic oligonucleotide
  source 1..37: mol_type = other DNA
gaatcatccggccctaaactccactgtgccctcttga

SEQ ID NO: 941 - DNA, 35 bp, synthetic construct
  misc_feature 1..35: note = Synthetic oligonucleotide
  source 1..35: mol_type = other DNA
tgctaggtgatgaattaatttggtctctttttggt

SEQ ID NO: 942 - DNA, 35 bp, synthetic construct
  misc_feature 1..35: note = Synthetic oligonucleotide
  source 1..35: mol_type = other DNA
gcctacaggatttttgattgatcgatttcgcttct

SEQ ID NO: 943 - DNA, 36 bp, synthetic construct
  misc_feature 1..36: note = Synthetic oligonucleotide
  source 1..36: mol_type = other DNA
catgcaattcttcgcttcctattccttaagcttgta

SEQ ID NO: 944 - DNA, 36 bp, synthetic construct
  misc_feature 1..36: note = Synthetic oligonucleotide
  source 1..36: mol_type = other DNA
gctaactgcttggcgtgcgagctgaaccaacgctta

SEQ ID NO: 945 - DNA, 36 bp, synthetic construct
  misc_feature 1..36: note = Synthetic oligonucleotide
  source 1..36: mol_type = other DNA
gccgaaaacatcgctgttcgtcttatcaactcgccc

SEQ ID NO: 946 - DNA, 36 bp, synthetic construct
  misc_feature 1..36: note = Synthetic oligonucleotide
  source 1..36: mol_type = other DNA
atgcctgtccaaaaactctaccgtgccgtgttacta

SEQ ID NO: 947 - DNA, 37 bp, synthetic construct
  misc_feature 1..37: note = Synthetic oligonucleotide
  source 1..37: mol_type = other DNA
catgcgtcgattcactatcttcgctttcaattgctga

SEQ ID NO: 948 - DNA, 35 bp, synthetic construct
  misc_feature 1..35: note = Synthetic oligonucleotide
  source 1..35: mol_type = other DNA
gtcaaatgtcaatgggcaccacgcactgttcgcgc

SEQ ID NO: 949 - DNA, 36 bp, synthetic construct
  misc_feature 1..36: note = Synthetic oligonucleotide
  source 1..36: mol_type = other DNA
gcgacacgattggtcaattcctcgctttcctctcta

SEQ ID NO: 950 - DNA, 36 bp, synthetic construct
  misc_feature 1..36: note = Synthetic oligonucleotide
  source 1..36: mol_type = other DNA
catagggacggaacgggcacggtagctcctaacgta

SEQ ID NO: 951 - DNA, 36 bp, synthetic construct
  misc_feature 1..36: note = Synthetic oligonucleotide
  source 1..36: mol_type = other DNA
taggcaactactaggtgatgcgtcaattacctctta

SEQ ID NO: 952 - DNA, 38 bp, synthetic construct
  misc_feature 1..38: note = Synthetic oligonucleotide
  source 1..38: mol_type = other DNA
tcacctaccacaagatcgtgcccctgaatcacttgtga

SEQ ID NO: 953 - DNA, 36 bp, synthetic construct
  misc_feature 1..36: note = Synthetic oligonucleotide
  source 1..36: mol_type = other DNA
agtcaggcatggtagacgcttctacttcgctttcta

SEQ ID NO: 954 - DNA, 37 bp, synthetic construct
  misc_feature 1..37: note = Synthetic oligonucleotide
  source 1..37: mol_type = other DNA
taacctaccaagtacatgacctttcacttgatcttga

SEQ ID NO: 955 - DNA, 38 bp, synthetic construct
  misc_feature 1..38: note = Synthetic oligonucleotide
  source 1..38: mol_type = other DNA
tatgccagcttctcatatatcccgctttctatcaatga

SEQ ID NO: 956 - DNA, 35 bp, synthetic construct
  misc_feature 1..35: note = Synthetic oligonucleotide
  source 1..35: mol_type = other DNA
gaagccgcgcgccaagcaaagggtactgcccctct

SEQ ID NO: 957 - DNA, 36 bp, synthetic construct
  misc_feature 1..36: note = Synthetic oligonucleotide
  source 1..36: mol_type = other DNA
atgcacggtgcggccggtcatgcaagacacttcgta

SEQ ID NO: 958 - DNA, 35 bp, synthetic construct
  misc_feature 1..35: note = Synthetic oligonucleotide
  source 1..35: mol_type = other DNA
ttcatttatctccaccgtgcactccatggatctta

SEQ ID NO: 959 - DNA, 36 bp, synthetic construct
  misc_feature 1..36: note = Synthetic oligonucleotide
  source 1..36: mol_type = other DNA
gcaggcttcgaatcctccactgtgctaatacatgaa

SEQ ID NO: 960 - DNA, 35 bp, synthetic construct
  misc_feature 1..35: note = Synthetic oligonucleotide
  source 1..35: mol_type = other DNA
atgcactgttgtgatcggcctgagcaggcgcccaa

SEQ ID NO: 961 - DNA, 38 bp, synthetic construct
  misc_feature 1..38: note = Synthetic oligonucleotide
  source 1..38: mol_type = other DNA
aacccctcgccgcgtgcctggcgacggagtagtaatga

SEQ ID NO: 962 - DNA, 37 bp, synthetic construct
  misc_feature 1..37: note = Synthetic oligonucleotide
  source 1..37: mol_type = other DNA
actccaccgtgccctttaatctcatgtgccacactga

SEQ ID NO: 963 - DNA, 35 bp, synthetic construct
  misc_feature 1..35: note = Synthetic oligonucleotide
  source 1..35: mol_type = other DNA
gcgattatattaatttctctaccgtgcgatcccaa

SEQ ID NO: 964 - DNA, 35 bp, synthetic construct
  misc_feature 1..35: note = Synthetic oligonucleotide
  source 1..35: mol_type = other DNA
atgcatcagcgcgcttattaatcaatcgcttttgt

SEQ ID NO: 965 - DNA, 34 bp, synthetic construct
  misc_feature 1..34: note = Synthetic oligonucleotide
  source 1..34: mol_type = other DNA
gcgtgccagcgtactcgcatctcacagaacccgt

SEQ ID NO: 966 - DNA, 35 bp, synthetic construct
  misc_feature 1..35: note = Synthetic oligonucleotide
  source 1..35: mol_type = other DNA
caaccactattcgcgtgccagggtggggaaacgtt

SEQ ID NO: 967 - DNA, 36 bp, synthetic construct
  misc_feature 1..36: note = Synthetic oligonucleotide
  source 1..36: mol_type = other DNA
tatgcaaccgggactgagagtcctagcgctttttta

SEQ ID NO: 968 - DNA, 36 bp, synthetic construct
  misc_feature 1..36: note = Synthetic oligonucleotide
  source 1..36: mol_type = other DNA
gcccgctttgtcaccggaattaattaactcgcctca

SEQ ID NO: 969 - DNA, 35 bp, synthetic construct
  misc_feature 1..35: note = Synthetic oligonucleotide
  source 1..35: mol_type = other DNA
tcacctactagattcgtgccagaatttcaaatttc

SEQ ID NO: 970 - DNA, 25 bp, synthetic construct
  misc_feature 1..25: note = Synthetic oligonucleotide
  source 1..25: mol_type = other DNA
cgaaagccatgacctccgatcactc

SEQ ID NO: 971 - DNA, 35 bp, synthetic construct
  misc_feature 1..35: note = Synthetic oligonucleotide
  source 1..35: mol_type = other DNA
cctcaagacctaagcgacagcgtgaccttgtttca

SEQ ID NO: 972 - DNA, 68 bp, synthetic construct
  misc_feature 1..68: note = Synthetic oligonucleotide
  source 1..68: mol_type = other DNA
caagtttccaggtagtttgcgtgttttacgtaccctcaagacctaagcgacagcgtgaccttgtttca

SEQ ID NO: 973 - DNA, 66 bp, synthetic construct
  misc_feature 1..66: note = Synthetic oligonucleotide
  source 1..66: mol_type = other DNA
cagggtaggtatcgtgagtgttttacgtactcatcctcttcttttcttggtgttgagaagatgctc

SEQ ID NO: 974 - DNA, 69 bp, synthetic construct
  misc_feature 1..69: note = Synthetic oligonucleotide
  source 1..69: mol_type = other DNA
gaaagtacaggaaaatgcctgctgttttacgtaccacaattctgcgggttagcaggaaggttagggaac

SEQ ID NO: 975 - DNA, 63 bp, synthetic construct
  misc_feature 1..63: note = Synthetic oligonucleotide
  source 1..63: mol_type = other DNA
gagacagagtagggccaatgcgataatgctgttgagattattgagcttcatcatgaccagaag

SEQ ID NO: 976 - DNA, 66 bp, synthetic construct
  misc_feature 1..66: note = Synthetic oligonucleotide
  source 1..66: mol_type = other DNA
gagacagagaaaaagggatagttcgttcggtcaaagacgcctatcttccagtttgatcgggaaact

SEQ ID NO: 977 - DNA, 58 bp, synthetic construct
  misc_feature 1..58: note = Synthetic oligonucleotide
  source 1..58: mol_type = other DNA
gacgcgtggtgggttttacgtaccgaacctaactcctcgctacattcctattgttttc

SEQ ID NO: 978 - DNA, 57 bp, synthetic construct
  misc_feature 1..57: note = Synthetic oligonucleotide
  source 1..57: mol_type = other DNA
gcgcaggaccggttttacgtacccaatttggttttactcccctcgattatgcggagt

SEQ ID NO: 979 - DNA, 60 bp, synthetic construct
  misc_feature 1..60: note = Synthetic oligonucleotide
  source 1..60: mol_type = other DNA
gagacagaaagtcgcatgggcagtactttcgggttatatctatcatttacttgacaccct

SEQ ID NO: 980 - DNA, 67 bp, synthetic construct
  misc_feature 1..67: note = Synthetic oligonucleotide
  source 1..67: mol_type = other DNA
agtggagtttaattggccttcagttacgtactcaacagccactttttttccaaattttgcaagagcc

SEQ ID NO: 981 - DNA, 66 bp, synthetic construct
  misc_feature 1..66: note = Synthetic oligonucleotide
  source 1..66: mol_type = other DNA
gaacgattcgtagggtatgcatgtacgtactcaccgtgtggacggcaactcagagataacgcatat

SEQ ID NO: 982 - DNA, 60 bp, synthetic construct
  misc_feature 1..60: note = Synthetic oligonucleotide
  source 1..60: mol_type = other DNA
agtatcaacgccggcatgtacgtaccctggagtttatgtattgccaacgagtttgtcttt

SEQ ID NO: 983 - DNA, 60 bp, synthetic construct
  misc_feature 1..60: note = Synthetic oligonucleotide
  source 1..60: mol_type = other DNA
taaagggcgtggcatgtctacgtaccagataaggttgttattgtggaggatgttactaca

SEQ ID NO: 984 - DNA, 66 bp, synthetic construct
  misc_feature 1..66: note = Synthetic oligonucleotide
  source 1..66: mol_type = other DNA
gagacagaacattggcacagtagagataggtcttccttcctgtgttccagctacaaacttagaaac

SEQ ID NO: 985 - DNA, 63 bp, synthetic construct
  misc_feature 1..63: note = Synthetic oligonucleotide
  source 1..63: mol_type = other DNA
taatggcagccttacgtacctacgtactcataaaattggttttgcctttcagcaattcaactt

SEQ ID NO: 986 - DNA, 55 bp, synthetic construct
  misc_feature 1..55: note = Synthetic oligonucleotide
  source 1..55: mol_type = other DNA
cgggcgcactgactacgtacctggtcaagacttgcatgaggacccgcaaattcct

SEQ ID NO: 987 - DNA, 57 bp, synthetic construct
  misc_feature 1..57: note = Synthetic oligonucleotide
  source 1..57: mol_type = other DNA
gagacaggaagggcaccgtagactttcgttgggacgcttgaagcgcaagtagaaaac

SEQ ID NO: 988 - DNA, 58 bp, synthetic construct
  misc_feature 1..58: note = Synthetic oligonucleotide
  source 1..58: mol_type = other DNA
ccatcgcgactgcactacgtactccagcagacctgcaatatcaaagttataagcgcgt

SEQ ID NO: 989 - DNA, 63 bp, synthetic construct
  misc_feature 1..63: note = Synthetic oligonucleotide
  source 1..63: mol_type = other DNA
gagacagtcaaggcacagtggagtaatgcctgccaatgcactcgatcttgtcatttttttgcg

SEQ ID NO: 990 - DNA, 67 bp, synthetic construct
  misc_feature 1..67: note = Synthetic oligonucleotide
  source 1..67: mol_type = other DNA
ggtagagaatacaagggtctgcaactacgtaccaaactggagagagaagtgaagacgatttaaccca

SEQ ID NO: 991 - DNA, 57 bp, synthetic construct
  misc_feature 1..57: note = Synthetic oligonucleotide
  source 1..57: mol_type = other DNA
cggttcgcatggccatacgtaccgattgctgcattccgctcaacgcttgaggaagta

SEQ ID NO: 992 - DNA, 60 bp, synthetic construct
  misc_feature 1..60: note = Synthetic oligonucleotide
  source 1..60: mol_type = other DNA
gaaggggatgaccgcaatacgtactctgaggctgttaaagctgtagcaactcttccacga

SEQ ID NO: 993 - DNA, 58 bp, synthetic construct
  misc_feature 1..58: note = Synthetic oligonucleotide
  source 1..58: mol_type = other DNA
ccagtgacctgcagtgacgtactctaggacgcaaatcacttgaagaagtgaaagcgag

SEQ ID NO: 994 - DNA, 69 bp, synthetic construct
  misc_feature 1..69: note = Synthetic oligonucleotide
  source 1..69: mol_type = other DNA
tggagttcaacaatatcagttagcagtgacgtacccacgcgatgacgttcgtcaagagtcgcataatct

SEQ ID NO: 995 - DNA, 58 bp, synthetic construct
  misc_feature 1..58: note = Synthetic oligonucleotide
  source 1..58: mol_type = other DNA
cctgccacagtacctgacgtactcatttggaatgatgtgtactgggaataagacgacg

SEQ ID NO: 996 - DNA, 58 bp, synthetic construct
  misc_feature 1..58: note = Synthetic oligonucleotide
  source 1..58: mol_type = other DNA
ctggactgctgacctgacgtactcacaagaatccctgctagctgaaggagggtcaaac

SEQ ID NO: 997 - DNA, 66 bp, synthetic construct
  misc_feature 1..66: note = Synthetic oligonucleotide
  source 1..66: mol_type = other DNA
gaaaaatgacagacagcggttactgacgtaccttgacgtagattgctatcaggttacgatgactgc

SEQ ID NO: 998 - DNA, 64 bp, synthetic construct
  misc_feature 1..64: note = Synthetic oligonucleotide
  source 1..64: mol_type = other DNA
aggttcgacgactacagttactgacgtaccttacagatcgtgtgctcatgacttccacagacgt

SEQ ID NO: 999 - DNA, 61 bp, synthetic construct
  misc_feature 1..61: note = Synthetic oligonucleotide
  source 1..61: mol_type = other DNA
cgcatgagcttccttactgacgtactcttggaggagttgatagtggtaaaacaacattagc

SEQ ID NO: 1000 - DNA, 65 bp, synthetic construct
  misc_feature 1..65: note = Synthetic oligonucleotide
  source 1..65: mol_type = other DNA
gagacagtcaagtatttacaagtggcgcagcctacgtatatatccaagtggttatgtccgacggc

SEQ ID NO: 1001 - DNA, 75 bp, synthetic construct
  misc_feature 1..75: note = Synthetic oligonucleotide
  source 1..75: mol_type = other DNA
gagacagtaaaataagagagaacgtactagcttcgcattacagcaagaaggagtatggaacttatagcaagagag

SEQ ID NO: 1002 - DNA, 66 bp, synthetic construct
  misc_feature 1..66: note = Synthetic oligonucleotide
  source 1..66: mol_type = other DNA
ggaaagaatcgcgatgtttgtactgacgtaccacccctccaaacgcattcttattggcaaatggaa

SEQ ID NO: 1003 - DNA, 57 bp, synthetic construct
  misc_feature 1..57: note = Synthetic oligonucleotide
  source 1..57: mol_type = other DNA
ggcgtttacgggcatgacgtaccccgaagcaatactgtcgtcactctgtatgtccgt

SEQ ID NO: 1004 - DNA, 57 bp, synthetic construct
  misc_feature 1..57: note = Synthetic oligonucleotide
  source 1..57: mol_type = other DNA
gtcgaaaggcggcatgacgtacccgggaatcggcatttcgcattcttaggatctaaa

SEQ ID NO: 1005 - DNA, 70 bp, synthetic construct
  misc_feature 1..70: note = Synthetic oligonucleotide
  source 1..70: mol_type = other DNA
gagacaggagtgaatgagtttgagtatggaatgacccgatcttcataacggacaaactgaacgggccatt

SEQ ID NO: 1006 - DNA, 64 bp, synthetic construct
  misc_feature 1..64: note = Synthetic oligonucleotide
  source 1..64: mol_type = other DNA
gttaatggaagcttgtcgcatgacgtactcgctatgcagacgagctggcagaggagagaaatca

SEQ ID NO: 1007 - DNA, 63 bp, synthetic construct
  misc_feature 1..63: note = Synthetic oligonucleotide
  source 1..63: mol_type = other DNA
atgataagggtagctcgcatgacgtactcattcgcaaccatgtgaagtaatgtgagcgtactt

SEQ ID NO: 1008 - DNA, 56 bp, synthetic construct
  misc_feature 1..56: note = Synthetic oligonucleotide
  source 1..56: mol_type = other DNA
ggcgcaatcgcatgacgtactcaccagttagcgtggcgtataccatgttgttaaca

SEQ ID NO: 1009 - DNA, 67 bp, synthetic construct
  misc_feature 1..67: note = Synthetic oligonucleotide
  source 1..67: mol_type = other DNA
gagacagtgataatttagggctacggagtacgcctgaatcaatagaacaatatcagttatggcggtg

SEQ ID NO: 1010 - DNA, 67 bp, synthetic construct
  misc_feature 1..67: note = Synthetic oligonucleotide
  source 1..67: mol_type = other DNA
gagacagatgattagggtagtagagaacgcaccggttgttaatatgacaggccgctaaagacgttct

SEQ ID NO: 1011 - DNA, 68 bp, synthetic construct
  misc_feature 1..68: note = Synthetic oligonucleotide
  source 1..68: mol_type = other DNA
gagacagtttgaatcatgagtttgtgaaagcgtccgtctcagatgagtgggttaatcaatcaagtatg

SEQ ID NO: 1012 - DNA, 64 bp, synthetic construct
  misc_feature 1..64: note = Synthetic oligonucleotide
  source 1..64: mol_type = other DNA
gagagaataggacgtacgcatgacgtactctgacacattagtaacgtcggcaagcacttagtcg

SEQ ID NO: 1013 - DNA, 58 bp, synthetic construct
  misc_feature 1..58: note = Synthetic oligonucleotide
  source 1..58: mol_type = other DNA
tgggtgtgcgtacatgacgtactcgtgaaccagattatgtatggacgcgcaatagata

SEQ ID NO: 1014 - DNA, 58 bp, synthetic construct
  misc_feature 1..58: note = Synthetic oligonucleotide
  source 1..58: mol_type = other DNA
ggtttccgcattgcaggacgtaccatacgaaatttgagcaagcaattgaaggcttaga

SEQ ID NO: 1015 - DNA, 53 bp, synthetic construct
  misc_feature 1..53: note = Synthetic oligonucleotide
  source 1..53: mol_type = other DNA
ccctggctcgcgacgtacctatcagctaatagggtcggctcaacagtgtatcc

SEQ ID NO: 1016 - DNA, 62 bp, synthetic construct
  misc_feature 1..62: note = Synthetic oligonucleotide
  source 1..62: mol_type = other DNA
cagtagagaacaagtcgcacgacgtacctatcaattcgtgaccccgatcatccagtccagaa

SEQ ID NO: 1017 - DNA, 61 bp, synthetic construct
  misc_feature 1..61: note = Synthetic oligonucleotide
  source 1..61: mol_type = other DNA
gagacaggcaaagatgaaagcgcatgcttgagctctaggcccaaaacgaccttaatggtca

SEQ ID NO: 1018 - DNA, 52 bp, synthetic construct
  misc_feature 1..52: note = Synthetic oligonucleotide
  source 1..52: mol_type = other DNA
tgcccgccctcacgtacctagcccagatcctacgagatgagctacgtaacta

SEQ ID NO: 1019 - DNA, 55 bp, synthetic construct
  misc_feature 1..55: note = Synthetic oligonucleotide
  source 1..55: mol_type = other DNA
gttggaccgccctcacgtaccaaatgcactctatatggagggagagtagctggat

SEQ ID NO: 1020 - DNA, 57 bp, synthetic construct
  misc_feature 1..57: note = Synthetic oligonucleotide
  source 1..57: mol_type = other DNA
actcctgtacgccctcacgtaccctggtctaggtatctaattcgtgggtcgggtact

SEQ ID NO: 1021 - DNA, 63 bp, synthetic construct
  misc_feature 1..63: note = Synthetic oligonucleotide
  source 1..63: mol_type = other DNA
gccattaacttcagtagccctcacgtaccattagctcggatgctatcagcttgcgcctattat

SEQ ID NO: 1022 - DNA, 65 bp, synthetic construct
  misc_feature 1..65: note = Synthetic oligonucleotide
  source 1..65: mol_type = other DNA
gagacaggataaaggtaagaaaagcggctgcacgatctgtattttgcacctttcgctatgctgag

SEQ ID NO: 1023 - DNA, 64 bp, synthetic construct
  misc_feature 1..64: note = Synthetic oligonucleotide
  source 1..64: mol_type = other DNA
gagacagtcaggaaggaaaatgtacgcacctgtgtccgtctatacgcatactggtccacatata

SEQ ID NO: 1024 - DNA, 62 bp, synthetic construct
  misc_feature 1..62: note = Synthetic oligonucleotide
  source 1..62: mol_type = other DNA
gagacagagggacaaggaggaaattggcatgttggagttaacggagacccgccatcgtttac

SEQ ID NO: 1025 - DNA, 53 bp, synthetic construct
  misc_feature 1..53: note = Synthetic oligonucleotide
  source 1..53: mol_type = other DNA
ggacggcccctcacgtaccgctcattttgaacatacgattgcgattacggaaa

SEQ ID NO: 1026 - DNA, 55 bp, synthetic construct
  misc_feature 1..55: note = Synthetic oligonucleotide
  source 1..55: mol_type = other DNA
atgaccgcccctcacgtactcctatgcatcatgtgcctcactaggacatcatgct

SEQ ID NO: 1027 - DNA, 66 bp, synthetic construct
  misc_feature 1..66: note = Synthetic oligonucleotide
  source 1..66: mol_type = other DNA
cacagtagaggaatatgcgctatcacgtactcctaaattgggaaaaaaggttttagctattgatgg

SEQ ID NO: 1028 - DNA, 59 bp, synthetic construct
  misc_feature 1..59: note = Synthetic oligonucleotide
  source 1..59: mol_type = other DNA
gagacagtcattgggcacggtagacttcagttaaaggctatcttgctccgctcgttctc

SEQ ID NO: 1029 - DNA, 61 bp, synthetic construct
  misc_feature 1..61: note = Synthetic oligonucleotide
  source 1..61: mol_type = other DNA
gcacggtagagagtagttgcacgtaccttaaagctatccacgaatgtcaaaaatgtggttt

SEQ ID NO: 1030 - DNA, 73 bp, synthetic construct
  misc_feature 1..73: note = Synthetic oligonucleotide
  source 1..73: mol_type = other DNA
gagacagtatgagataagcacagtagagattgacatgtcccgaatgtataatgctgacgttcttgcttttggc

SEQ ID NO: 1031 - DNA, 58 bp, synthetic construct
  misc_feature 1..58: note = Synthetic oligonucleotide
  source 1..58: mol_type = other DNA
gagacagtaggggcacggtagagcctattgaagcaatcctctccccaatacttaaaaa

SEQ ID NO: 1032 - DNA, 54 bp, synthetic construct
  misc_feature 1..54: note = Synthetic oligonucleotide
  source 1..54: mol_type = other DNA
gggggtgtcctgcacgtacctacggttaccgtctttataagtgaacaaaaccgg

SEQ ID NO: 1033 - DNA, 63 bp, synthetic construct
  misc_feature 1..63: note = Synthetic oligonucleotide
  source 1..63: mol_type = other DNA
gtagagtatccacgcaaactgcacgtacctctgtgaactgtcatcggtccgatcaattagtct

SEQ ID NO: 1034 - DNA, 63 bp, synthetic construct
  misc_feature 1..63: note = Synthetic oligonucleotide
  source 1..63: mol_type = other DNA
gcacggtagagttcatgtatgcacgtacctcccctttcccaagtaaatgtacgggaattatcg

SEQ ID NO: 1035 - DNA, 67 bp, synthetic construct
  misc_feature 1..67: note = Synthetic oligonucleotide
  source 1..67: mol_type = other DNA
gagacagggcacggtagagtaaaataatgtgacgctttattatgtgttcgtctaactctgtttctgt

SEQ ID NO: 1036 - DNA, 57 bp, synthetic construct
  misc_feature 1..57: note = Synthetic oligonucleotide
  source 1..57: mol_type = other DNA
aaagtgcgcctgatgcacgtacccgagtgcatgagctgtctttcacatgatacatcg

SEQ ID NO: 1037 - DNA, 61 bp, synthetic construct
  misc_feature 1..61: note = Synthetic oligonucleotide
  source 1..61: mol_type = other DNA
ctcgagaacgatactgtggcacgtacctatttctgttcacggatgaaggcctatatcaatg

SEQ ID NO: 1038 - DNA, 55 bp, synthetic construct
  misc_feature 1..55: note = Synthetic oligonucleotide
  source 1..55: mol_type = other DNA
ccctctcgcatggcacgtacccatccactttcatggaaacaataagagcagggaa

SEQ ID NO: 1039 - DNA, 62 bp, synthetic construct
  misc_feature 1..62: note = Synthetic oligonucleotide
  source 1..62: mol_type = other DNA
gagacagtcacgtcatttcagatggcacacaaactcactactaccaacaacctcaccaaaaa

SEQ ID NO: 1040 - DNA, 78 bp, synthetic construct
  misc_feature 1..78: note = Synthetic oligonucleotide
  source 1..78: mol_type = other DNA
gagacagtcaaccttaatataagcacagtagagttacaagttcctcatgtcctctgttaatccagcctgaatatgcca

SEQ ID NO: 1041 - DNA, 62 bp, synthetic construct
  misc_feature 1..62: note = Synthetic oligonucleotide
  source 1..62: mol_type = other DNA
gcacagtagagtattggtcgcacgtaccagaaatgtcactcccatggtggctgatatagaaa

SEQ ID NO: 1042 - DNA, 58 bp, synthetic construct
  misc_feature 1..58: note = Synthetic oligonucleotide
  source 1..58: mol_type = other DNA
gagacagaggagtgagcacggttcatgtcgaaccttggataggagcgaccgattacgt

SEQ ID NO: 1043 - DNA, 62 bp, synthetic construct
  misc_feature 1..62: note = Synthetic oligonucleotide
  source 1..62: mol_type = other DNA
ggttacatgggctttatcgcacgtactctcaggttgttacttgaagggttcaacacgagctc

SEQ ID NO: 1044 - DNA, 60 bp, synthetic construct
  misc_feature 1..60: note = Synthetic oligonucleotide
  source 1..60: mol_type = other DNA
ggtagagacaacttgcgcacgtactcagaagatcaaaaaacgatccctgtccatcaatac

SEQ ID NO: 1045 - DNA, 65 bp, synthetic construct
  misc_feature 1..65: note = Synthetic oligonucleotide
  source 1..65: mol_type = other DNA
gagacagaataaagcacggtggagacaatgcttaggctaccaaatgaatttaaagccagctgaaa

SEQ ID NO: 1046 - DNA, 65 bp, synthetic construct
  misc_feature 1..65: note = Synthetic oligonucleotide
  source 1..65: mol_type = other DNA
gagacagtaggaaataggcacggtagagttccaatgcttgcagtatgtatcctgatcgtgcgtgc

SEQ ID NO: 1047 - DNA, 53 bp, synthetic construct
  misc_feature 1..53: note = Synthetic oligonucleotide
  source 1..53: mol_type = other DNA
aggtcggtgcgcacgtaccctgcattctcatggaaatgcaatggattcattcc

SEQ ID NO: 1048 - DNA, 54 bp, synthetic construct
  misc_feature 1..54: note = Synthetic oligonucleotide
  source 1..54: mol_type = other DNA
gtgtggtggcgcacgtactcctgttgcagtatcacgtaaatacctacttcgata

SEQ ID NO: 1049 - DNA, 67 bp, synthetic construct
  misc_feature 1..67: note = Synthetic oligonucleotide
  source 1..67: mol_type = other DNA
gagacagaagaaagtaatcggaagtcgggtagctagctgttatggctattgctgaaacagcaaaatt

SEQ ID NO: 1050 - DNA, 65 bp, synthetic construct
  misc_feature 1..65: note = Synthetic oligonucleotide
  source 1..65: mol_type = other DNA
acagtagagtaatatagtccgcgcacgtacccttacgacttcactgcaattgacgattcagttaa

SEQ ID NO: 1051 - DNA, 67 bp, synthetic construct
  misc_feature 1..67: note = Synthetic oligonucleotide
  source 1..67: mol_type = other DNA
gagacagcaaaaaggtggttgtataaagtgcccctcataccaatgtaaagtatagttaacgccctgt

SEQ ID NO: 1052 - DNA, 61 bp, synthetic construct
  misc_feature 1..61: note = Synthetic oligonucleotide
  source 1..61: mol_type = other DNA
gagacaggatggcacagtggagtaagcatctccatgactgcttgagcggctggagaatctg

SEQ ID NO: 1053 - DNA, 58 bp, synthetic construct
  misc_feature 1..58: note = Synthetic oligonucleotide
  source 1..58: mol_type = other DNA
acagtagaggtcaccgcacgtacctttcgccacccatataaaccccacttcgtcctca

SEQ ID NO: 1054 - DNA, 60 bp, synthetic construct
  misc_feature 1..60: note = Synthetic oligonucleotide
  source 1..60: mol_type = other DNA
cggtagaggttctgtacgcacgtaccaaggcagagcaaatgtgacactgtctatcagtac

SEQ ID NO: 1055 - DNA, 53 bp, synthetic construct
  misc_feature 1..53: note = Synthetic oligonucleotide
  source 1..53: mol_type = other DNA
gggaggggacgcacgtaccctacatatataggaaaagggaaggtagaagagct

SEQ ID NO: 1056 - DNA, 66 bp, synthetic construct
  misc_feature 1..66: note = Synthetic oligonucleotide
  source 1..66: mol_type = other DNA
gagacaggaaaatcgcatacgtcttgcatacccttctggaatttcttcctttgattttgccatttt

SEQ ID NO: 1057 - DNA, 59 bp, synthetic construct
  misc_feature 1..59: note = Synthetic oligonucleotide
  source 1..59: mol_type = other DNA
gaggtggatcggtctagcacgtacctcctaaggttgctgatttggttgttggagaccca

SEQ ID NO: 1058 - DNA, 61 bp, synthetic construct
  misc_feature 1..61: note = Synthetic oligonucleotide
  source 1..61: mol_type = other DNA
acggtagagctaagctagcacgtactcaaggcctagcctaaaggttcttgcagagcaacat

SEQ ID NO: 1059 - DNA, 53 bp, synthetic construct
  misc_feature 1..53: note = Synthetic oligonucleotide
  source 1..53: mol_type = other DNA
cggcctgcagcacgtactcctaattagctctaggaaacacaaccccgggattt

SEQ ID NO: 1060 - DNA, 56 bp, synthetic construct
  misc_feature 1..56: note = Synthetic oligonucleotide
  source 1..56: mol_type = other DNA
gaacgcctgaccagcacgtaccttgagttatacggaacttcgcaaaagtattccct

SEQ ID NO: 1061 - DNA, 73 bp, synthetic construct
  misc_feature 1..73: note = Synthetic oligonucleotide
  source 1..73: mol_type = other DNA
gagacagaaatgcacagtagagtaaaatatcttgcctgccatccatcaacaactgctccaacagcctttccat

SEQ ID NO: 1062 - DNA, 62 bp, synthetic construct
  misc_feature 1..62: note = Synthetic oligonucleotide
  source 1..62: mol_type = other DNA
gagacaggcacagtagaggtgaggataccggcacaagcagacaaaatcaacatggtcattta

SEQ ID NO: 1063 - DNA, 60 bp, synthetic construct
  misc_feature 1..60: note = Synthetic oligonucleotide
  source 1..60: mol_type = other DNA
gagacagggcataaagggcacagtacgctcacgtgatctaccctagctgaccgctaatga

SEQ ID NO: 1064 - DNA, 60 bp, synthetic construct
  misc_feature 1..60: note = Synthetic oligonucleotide
  source 1..60: mol_type = other DNA
gagacagtcaaggagcacggtagagctctaacctgcatacatatggcatttagttgttca

SEQ ID NO: 1065 - DNA, 63 bp, synthetic construct
  misc_feature 1..63: note = Synthetic oligonucleotide
  source 1..63: mol_type = other DNA
ggcacggtagagaaatcgcataacgtacccttcttgaagacctatgtaaagaaacgggtcact

SEQ ID NO: 1066 - DNA, 66 bp, synthetic construct
  misc_feature 1..66: note = Synthetic oligonucleotide
  source 1..66: mol_type = other DNA
gagacagaggataaggtcgtgtaataggtggccatacgcatgactacattacaacgggccaggaag

SEQ ID NO: 1067 - DNA, 64 bp, synthetic construct
  misc_feature 1..64: note = Synthetic oligonucleotide
  source 1..64: mol_type = other DNA
gagacagagaagaaagtaagcgttggcaccaggtctcgatctcgtacaaaacgactatgaccat

SEQ ID NO: 1068 - DNA, 60 bp, synthetic construct
  misc_feature 1..60: note = Synthetic oligonucleotide
  source 1..60: mol_type = other DNA
ccggctatgactgcttgaacgtactcatgaacgtgtcgtgttatgcagcggtatgtcgtg

SEQ ID NO: 1069 - DNA, 59 bp, synthetic construct
  misc_feature 1..59: note = Synthetic oligonucleotide
  source 1..59: mol_type = other DNA
gagacagtttggtggcacggtagacgtcgtgtcttagacgactgtgtgtgattctcgag

SEQ ID NO: 1070 - DNA, 58 bp, synthetic construct
  misc_feature 1..58: note = Synthetic oligonucleotide
  source 1..58: mol_type = other DNA
gcgaaatgactgcgcaacgtactccaccgttttgccagttccaccagtaactgtaagg

SEQ ID NO: 1071 - DNA, 61 bp, synthetic construct
  misc_feature 1..61: note = Synthetic oligonucleotide
  source 1..61: mol_type = other DNA
agagtactaccgcctgacaacgtactcgccctggaacaacggttatattctctggcagaac

SEQ ID NO: 1072 - DNA, 38 bp, synthetic construct
  misc_feature 1..38: note = Synthetic oligonucleotide
  source 1..38: mol_type = other DNA
tcggacttgatctacacattgacacattgataccctga

SEQ ID NO: 1073 - DNA, 37 bp, synthetic construct
  misc_feature 1..37: note = Synthetic oligonucleotide
  source 1..37: mol_type = other DNA
cgtttgacttagacggactgccttgatcactgactga

SEQ ID NO: 1074 - DNA, 37 bp, synthetic construct
  misc_feature 1..37: note = Synthetic oligonucleotide
  source 1..37: mol_type = other DNA
gagttctccttaaaatctgaccctgacaacgagtgga

SEQ ID NO: 1075 - DNA, 38 bp, synthetic construct
  misc_feature 1..38: note = Synthetic oligonucleotide
  source 1..38: mol_type = other DNA
atactggaggtcatgattctgatcccgtgatattctga

SEQ ID NO: 1076 - DNA, 38 bp, synthetic construct
  misc_feature 1..38: note = Synthetic oligonucleotide
  source 1..38: mol_type = other DNA
ggatacacgggagtctgcgttgacacattttgatttga

SEQ ID NO: 1077 - DNA, 38 bp, synthetic construct
  misc_feature 1..38: note = Synthetic oligonucleotide
  source 1..38: mol_type = other DNA
gtttgcaattgcttaggatactcaacctgactccatga

SEQ ID NO: 1078 - DNA, 38 bp, synthetic construct
  misc_feature 1..38: note = Synthetic oligonucleotide
  source 1..38: mol_type = other DNA
gcggtatttatgataatgactcgtgaccccaatattga

SEQ ID NO: 1079 - DNA, 38 bp, synthetic construct
  misc_feature 1..38: note = Synthetic oligonucleotide
  source 1..38: mol_type = other DNA
ggtcagctagtaaagtttatccgatgatttgattttga

SEQ ID NO: 1080 - DNA, 37 bp, synthetic construct
  misc_feature 1..37: note = Synthetic oligonucleotide
  source 1..37: mol_type = other DNA
gcaggatagtcatgcaaaatattcaacgataattaga

SEQ ID NO: 1081 - DNA, 38 bp, synthetic construct
  misc_feature 1..38: note = Synthetic oligonucleotide
  source 1..38: mol_type = other DNA
tgtgactataacgcactaagccgattctgacgatatga

SEQ ID NO: 1082 - DNA, 38 bp, synthetic construct
  misc_feature 1..38: note = Synthetic oligonucleotide
  source 1..38: mol_type = other DNA
ttttgtacctgcttcgataaccaacagttaggatttga

SEQ ID NO: 1083 - DNA, 38 bp, synthetic construct
  misc_feature 1..38: note = Synthetic oligonucleotide
  source 1..38: mol_type = other DNA
gactatcaaatgaccccgatcgatacgtaggacactga

SEQ ID NO: 1084 - DNA, 36 bp, synthetic construct
  misc_feature 1..36: note = Synthetic oligonucleotide
  source 1..36: mol_type = other DNA
aactggccgtgtgtgccggtgggataactgttacta

SEQ ID NO: 1085 - DNA, 36 bp, synthetic construct
  misc_feature 1..36: note = Synthetic oligonucleotide
  source 1..36: mol_type = other DNA
gaggactagccgatacttgataatgattatgacgta

SEQ ID NO: 1086 - DNA, 37 bp, synthetic construct
  misc_feature 1..37: note = Synthetic oligonucleotide
  source 1..37: mol_type = other DNA
gtgaatgacacacgtctgaccttggatcgctgattga

SEQ ID NO: 1087 - DNA, 38 bp, synthetic construct
  misc_feature 1..38: note = Synthetic oligonucleotide
  source 1..38: mol_type = other DNA
accgtggacttattgcttatattggacttagagcctga

SEQ ID NO: 1088 - DNA, 36 bp, synthetic construct
  misc_feature 1..36: note = Synthetic oligonucleotide
  source 1..36: mol_type = other DNA
gaggacgtacgccttgatgtttaactggattactga

SEQ ID NO: 1089 - DNA, 36 bp, synthetic construct
  misc_feature 1..36: note = Synthetic oligonucleotide
  source 1..36: mol_type = other DNA
caccccttttgattatccttattgatacttatatga

SEQ ID NO: 1090 - DNA, 38 bp, synthetic construct
  misc_feature 1..38: note = Synthetic oligonucleotide
  source 1..38: mol_type = other DNA
tcccgtgatgtgggaacgtagatctttgactgatttga

SEQ ID NO: 1091 - DNA, 38 bp, synthetic construct
  misc_feature 1..38: note = Synthetic oligonucleotide
  source 1..38: mol_type = other DNA
tcgtaatgcccaataaccaactggttaagtagacctga

SEQ ID NO: 1092 - DNA, 36 bp, synthetic construct
  misc_feature 1..36: note = Synthetic oligonucleotide
  source 1..36: mol_type = other DNA
gcgatcacaatttaccggaccgatctccctagacaa

SEQ ID NO: 1093 - DNA, 36 bp, synthetic construct
  misc_feature 1..36: note = Synthetic oligonucleotide
  source 1..36: mol_type = other DNA
gcgtacggaacggaaccgacacaacctgaataccta

SEQ ID NO: 1094 - DNA, 36 bp, synthetic construct
  misc_feature 1..36: note = Synthetic oligonucleotide
  source 1..36: mol_type = other DNA
gcgtacggaacggaaccgacacaacctgaataccga

SEQ ID NO: 1095 - DNA, 38 bp, synthetic construct
  misc_feature 1..38: note = Synthetic oligonucleotide
  source 1..38: mol_type = other DNA
gcttgaatccacgacgaaattacttaaaataaccctga

SEQ ID NO: 1096 - DNA, 38 bp, synthetic construct
  misc_feature 1..38: note = Synthetic oligonucleotide
  source 1..38: mol_type = other DNA
gccggggcggagcctacgatttatatcgcgattattga

SEQ ID NO: 1097 - DNA, 38 bp, synthetic construct
  misc_feature 1..38: note = Synthetic oligonucleotide
  source 1..38: mol_type = other DNA
aagtgcacactgcctcgatttacatttcggacctatga

SEQ ID NO: 1098 - DNA, 38 bp, synthetic construct
  misc_feature 1..38: note = Synthetic oligonucleotide
  source 1..38: mol_type = other DNA
gcgtactgtgcgcgattccgggatatatattcgattga

SEQ ID NO: 1099 - DNA, 38 bp, synthetic construct
  misc_feature 1..38: note = Synthetic oligonucleotide
  source 1..38: mol_type = other DNA
cacagacgttctcgttgatacccggacccgatatttga

SEQ ID NO: 1100 - DNA, 38 bp, synthetic construct
  misc_feature 1..38: note = Synthetic oligonucleotide
  source 1..38: mol_type = other DNA
tccattttggaacgtcgaattactcggatactaattga

SEQ ID NO: 1101 - DNA, 38 bp, synthetic construct
  misc_feature 1..38: note = Synthetic oligonucleotide
  source 1..38: mol_type = other DNA
actcgacgtaaaactatctgtgactcctaatacattga

SEQ ID NO: 1102 - DNA, 38 bp, synthetic construct
  misc_feature 1..38: note = Synthetic oligonucleotide
  source 1..38: mol_type = other DNA
accgtaacttgctagccttccggatccctccaatctga

SEQ ID NO: 1103 - DNA, 38 bp, synthetic construct
  misc_feature 1..38: note = Synthetic oligonucleotide
  source 1..38: mol_type = other DNA
ttcgtacagatacccccgataccccgccacctgattga

SEQ ID NO: 1104 - DNA, 34 bp, synthetic construct
  misc_feature 1..34: note = Synthetic oligonucleotide
  source 1..34: mol_type = other DNA
atattaatgccttgatccgactccgacctcttga

SEQ ID NO: 1105 - DNA, 38 bp, synthetic construct
  misc_feature 1..38: note = Synthetic oligonucleotide
  source 1..38: mol_type = other DNA
ttgacgcgacgtactattttgatcgtattccaatctga

SEQ ID NO: 1106 - DNA, 38 bp, synthetic construct
  misc_feature 1..38: note = Synthetic oligonucleotide
  source 1..38: mol_type = other DNA
gcgccgccacggtacttaaaaactcggactttacttga

SEQ ID NO: 1107 - DNA, 38 bp, synthetic construct
  misc_feature 1..38: note = Synthetic oligonucleotide
  source 1..38: mol_type = other DNA
cgtagtactgctacatccgaaccgaccataaatactga

SEQ ID NO: 1108 - DNA, 38 bp, synthetic construct
  misc_feature 1..38: note = Synthetic oligonucleotide
  source 1..38: mol_type = other DNA
gaggacgcagttgaccggatttccaccgattatattga

SEQ ID NO: 1109 - DNA, 38 bp, synthetic construct
  misc_feature 1..38: note = Synthetic oligonucleotide
  source 1..38: mol_type = other DNA
gaggactgaaccatctcggaccacccatggatacttga

SEQ ID NO: 1110 - DNA, 38 bp, synthetic construct
  misc_feature 1..38: note = Synthetic oligonucleotide
  source 1..38: mol_type = other DNA
tgcgcgagcaaacgcgactattgaaccttagaacctga

SEQ ID NO: 1111 - DNA, 35 bp, synthetic construct
  misc_feature 1..35: note = Synthetic oligonucleotide
  source 1..35: mol_type = other DNA
gctggtgacccctcttgaccttccttattgatttg

SEQ ID NO: 1112 - DNA, 38 bp, synthetic construct
  misc_feature 1..38: note = Synthetic oligonucleotide
  source 1..38: mol_type = other DNA
gagtacctcaccgctttcgattatcgttctgaccttga

SEQ ID NO: 1113 - DNA, 36 bp, synthetic construct
  misc_feature 1..36: note = Synthetic oligonucleotide
  source 1..36: mol_type = other DNA
agccacttcctgctttgaaccggactccttatataa

SEQ ID NO: 1114 - DNA, 38 bp, synthetic construct
  misc_feature 1..38: note = Synthetic oligonucleotide
  source 1..38: mol_type = other DNA
attgagcgtacgcatctaccggattaccttacttttga

SEQ ID NO: 1115 - DNA, 37 bp, synthetic construct
  misc_feature 1..37: note = Synthetic oligonucleotide
  source 1..37: mol_type = other DNA
gaacttacgttactaacctgactctatcttacattga

SEQ ID NO: 1116 - DNA, 37 bp, synthetic construct
  misc_feature 1..37: note = Synthetic oligonucleotide
  source 1..37: mol_type = other DNA
gcaccactattgtgggaattcctgattttactattga

SEQ ID NO: 1117 - DNA, 37 bp, synthetic construct
  misc_feature 1..37: note = Synthetic oligonucleotide
  source 1..37: mol_type = other DNA
gcgtgcctgcctggctctgactccgattattcattga

SEQ ID NO: 1118 - DNA, 38 bp, synthetic construct
  misc_feature 1..38: note = Synthetic oligonucleotide
  source 1..38: mol_type = other DNA
agttccttactaacacaacttttggatatttaaattga

SEQ ID NO: 1119 - DNA, 37 bp, synthetic construct
  misc_feature 1..37: note = Synthetic oligonucleotide
  source 1..37: mol_type = other DNA
actgccttttcttactgggatacttattgattattga

SEQ ID NO: 1120 - DNA, 38 bp, synthetic construct
  misc_feature 1..38: note = Synthetic oligonucleotide
  source 1..38: mol_type = other DNA
atagtacactacctactgactccctatattatgaatga

SEQ ID NO: 1121 - DNA, 38 bp, synthetic construct
  misc_feature 1..38: note = Synthetic oligonucleotide
  source 1..38: mol_type = other DNA
gcgatacaacccttcatttctgactaccgatatattga

SEQ ID NO: 1122 - DNA, 36 bp, synthetic construct
  misc_feature 1..36: note = Synthetic oligonucleotide
  source 1..36: mol_type = other DNA
gcatctttcttcttaatgatttaccgttctcacata

SEQ ID NO: 1123 - DNA, 36 bp, synthetic construct
  misc_feature 1..36: note = Synthetic oligonucleotide
  source 1..36: mol_type = other DNA
accacgtgttattctctgtatttcactttgtctcaa

SEQ ID NO: 1124 - DNA, 36 bp, synthetic construct
  misc_feature 1..36: note = Synthetic oligonucleotide
  source 1..36: mol_type = other DNA
accgggaacatttctgtcgtttcatttcatcactaa

SEQ ID NO: 1125 - DNA, 36 bp, synthetic construct
  misc_feature 1..36: note = Synthetic oligonucleotide
  source 1..36: mol_type = other DNA
agtttattgctccttcccactattgtctatctcgca

SEQ ID NO: 1126 - DNA, 36 bp, synthetic construct
  misc_feature 1..36: note = Synthetic oligonucleotide
  source 1..36: mol_type = other DNA
tcgcttccttgtacttcctatacccttttcaccaca

SEQ ID NO: 1127 - DNA, 35 bp, synthetic construct
  misc_feature 1..35: note = Synthetic oligonucleotide
  source 1..35: mol_type = other DNA
actaactcgcccactcttctcatttggaacctatc

SEQ ID NO: 1128 - DNA, 36 bp, synthetic construct
  misc_feature 1..36: note = Synthetic oligonucleotide
  source 1..36: mol_type = other DNA
actccccctcagctatcatacatcactcgcatctaa

SEQ ID NO: 1129 - DNA, 38 bp, synthetic construct
  misc_feature 1..38: note = Synthetic oligonucleotide
  source 1..38: mol_type = other DNA
aatatatacgcgctacaaatcttttctcctactgatga

SEQ ID NO: 1130 - DNA, 37 bp, synthetic construct
  misc_feature 1..37: note = Synthetic oligonucleotide
  source 1..37: mol_type = other DNA
actatactcacatcctatttaattattggcttaatga

SEQ ID NO: 1131 - DNA, 38 bp, synthetic construct
  misc_feature 1..38: note = Synthetic oligonucleotide
  source 1..38: mol_type = other DNA
atcgatcctgcctaacctggtaaacaactcatttctga

SEQ ID NO: 1132 - DNA, 35 bp, synthetic construct
  misc_feature 1..35: note = Synthetic oligonucleotide
  source 1..35: mol_type = other DNA
ttagctgcttcccagacccaagctattatttttca

SEQ ID NO: 1133 - DNA, 36 bp, synthetic construct
  misc_feature 1..36: note = Synthetic oligonucleotide
  source 1..36: mol_type = other DNA
tccctgcatcttaacttctatagggtttgcttaaaa

SEQ ID NO: 1134 - DNA, 36 bp, synthetic construct
  misc_feature 1..36: note = Synthetic oligonucleotide
  source 1..36: mol_type = other DNA
gggtcactccgtaaggcctctactccaaattataaa

SEQ ID NO: 1135 - DNA, 36 bp, synthetic construct
  misc_feature 1..36: note = Synthetic oligonucleotide
  source 1..36: mol_type = other DNA
aactgtacggcgcaattttactctcaagtaccaaca

SEQ ID NO: 1136 - DNA, 35 bp, synthetic construct
  misc_feature 1..35: note = Synthetic oligonucleotide
  source 1..35: mol_type = other DNA
tgcggactttattcgcttgatgcctatcctgttat

SEQ ID NO: 1137 - DNA, 36 bp, synthetic construct
  misc_feature 1..36: note = Synthetic oligonucleotide
  source 1..36: mol_type = other DNA
tccgccacatcgggttatacttttgaactagttaaa

SEQ ID NO: 1138 - DNA, 38 bp, synthetic construct
  misc_feature 1..38: note = Synthetic oligonucleotide
  source 1..38: mol_type = other DNA
tgttccttcgagttccatcccaaagagttaattcatga

SEQ ID NO: 1139 - DNA, 35 bp, synthetic construct
  misc_feature 1..35: note = Synthetic oligonucleotide
  source 1..35: mol_type = other DNA
tcctgcgactctacggtatattcctttaatcgaca

SEQ ID NO: 1140 - DNA, 38 bp, synthetic construct
  misc_feature 1..38: note = Synthetic oligonucleotide
  source 1..38: mol_type = other DNA
agtaaaattccggttcatccacactgagctttcaatga

SEQ ID NO: 1141 - DNA, 36 bp, synthetic construct
  misc_feature 1..36: note = Synthetic oligonucleotide
  source 1..36: mol_type = other DNA
ttaactccttgaagtacgtcctaggccccctcacca

SEQ ID NO: 1142 - DNA, 36 bp, synthetic construct
  misc_feature 1..36: note = Synthetic oligonucleotide
  source 1..36: mol_type = other DNA
tggagtactggtgccgaacgtttttgaacgggttga

SEQ ID NO: 1143 - DNA, 38 bp, synthetic construct
  misc_feature 1..38: note = Synthetic oligonucleotide
  source 1..38: mol_type = other DNA
gagtactatagagccaagacctcatttagtcactctga

SEQ ID NO: 1144 - DNA, 36 bp, synthetic construct
  misc_feature 1..36: note = Synthetic oligonucleotide
  source 1..36: mol_type = other DNA
ccgacccataacactttcgcttcaagcatctaggca

SEQ ID NO: 1145 - DNA, 36 bp, synthetic construct
  misc_feature 1..36: note = Synthetic oligonucleotide
  source 1..36: mol_type = other DNA
cgtccgcacccctttttcaccttgttctgctatgca

SEQ ID NO: 1146 - DNA, 35 bp, synthetic construct
  misc_feature 1..35: note = Synthetic oligonucleotide
  source 1..35: mol_type = other DNA
gagcctctgtaacccaatcttcaactgcagggacc

SEQ ID NO: 1147 - DNA, 35 bp, synthetic construct
  misc_feature 1..35: note = Synthetic oligonucleotide
  source 1..35: mol_type = other DNA
gagttctccagctagatattccaatacggaaccga

SEQ ID NO: 1148 - DNA, 38 bp, synthetic construct
  misc_feature 1..38: note = Synthetic oligonucleotide
  source 1..38: mol_type = other DNA
gagtattgcgaagattgggtttatcggttctaacatga

SEQ ID NO: 1149 - DNA, 37 bp, synthetic construct
  misc_feature 1..37: note = Synthetic oligonucleotide
  source 1..37: mol_type = other DNA
aaacgctattacggctgacccggtgactcgggattga

SEQ ID NO: 1150 - DNA, 36 bp, synthetic construct
  misc_feature 1..36: note = Synthetic oligonucleotide
  source 1..36: mol_type = other DNA
accgactccagtttcacgggaatattctcaccggga

SEQ ID NO: 1151 - DNA, 38 bp, synthetic construct
  misc_feature 1..38: note = Synthetic oligonucleotide
  source 1..38: mol_type = other DNA
gttgtcggtttccattagttcgatatcttgccgtgaga

SEQ ID NO: 1152 - DNA, 38 bp, synthetic construct
  misc_feature 1..38: note = Synthetic oligonucleotide
  source 1..38: mol_type = other DNA
atgggaatcacgtagctgtaacgataatccatgggtga

SEQ ID NO: 1153 - DNA, 35 bp, synthetic construct
  misc_feature 1..35: note = Synthetic oligonucleotide
  source 1..35: mol_type = other DNA
aggtactgacgattctttaaagtgactactggtga

SEQ ID NO: 1154 - DNA, 38 bp, synthetic construct
  misc_feature 1..38: note = Synthetic oligonucleotide
  source 1..38: mol_type = other DNA
ggcggtggaagtccgaactgccgagttaaattccctga

SEQ ID NO: 1155 - DNA, 38 bp, synthetic construct
  misc_feature 1..38: note = Synthetic oligonucleotide
  source 1..38: mol_type = other DNA
tatcggtcttacgaaagccggcacgtacgtttctttga

SEQ ID NO: 1156 - DNA, 38 bp, synthetic construct
  misc_feature 1..38: note = Synthetic oligonucleotide
  source 1..38: mol_type = other DNA
tgacggatgataggcatgacctcgtagaccacatctga

SEQ ID NO: 1157 - DNA, 38 bp, synthetic construct
  misc_feature 1..38: note = Synthetic oligonucleotide
  source 1..38: mol_type = other DNA
tttgtaccatccttacaaatgagatcttgttatgttga

SEQ ID NO: 1158 - DNA, 36 bp, synthetic construct
  misc_feature 1..36: note = Synthetic oligonucleotide
  source 1..36: mol_type = other DNA
tacatgcgtactataaaccctattgtttactggtaa

SEQ ID NO: 1159 - DNA, 35 bp, synthetic construct
  misc_feature 1..35: note = Synthetic oligonucleotide
  source 1..35: mol_type = other DNA
gcaagtctagatcttcattcatttgttcatgtttt

SEQ ID NO: 1160 - DNA, 35 bp, synthetic construct
  misc_feature 1..35: note = Synthetic oligonucleotide
  source 1..35: mol_type = other DNA
gagtttgcgggaatcttccccgaacaaggggctaa

SEQ ID NO: 1161 - DNA, 35 bp, synthetic construct
  misc_feature 1..35: note = Synthetic oligonucleotide
  source 1..35: mol_type = other DNA
tagaccgttggaggtccggggttggtgcccgatta

SEQ ID NO: 1162 - DNA, 37 bp, synthetic construct
  misc_feature 1..37: note = Synthetic oligonucleotide
  source 1..37: mol_type = other DNA
acactcatacgagatctgattatacacgcgccttgga

SEQ ID NO: 1163 - DNA, 37 bp, synthetic construct
  misc_feature 1..37: note = Synthetic oligonucleotide
  source 1..37: mol_type = other DNA
gtcgtcgggagaccacttatcttttttccatgccgga

SEQ ID NO: 1164 - DNA, 35 bp, synthetic construct
  misc_feature 1..35: note = Synthetic oligonucleotide
  source 1..35: mol_type = other DNA
tcacctgacgttacactcctccgtacaaacgtgta

SEQ ID NO: 1165 - DNA, 35 bp, synthetic construct
  misc_feature 1..35: note = Synthetic oligonucleotide
  source 1..35: mol_type = other DNA
tcctgattaattcatggtcacaactcccggtttcc

SEQ ID NO: 1166 - DNA, 36 bp, synthetic construct
  misc_feature 1..36: note = Synthetic oligonucleotide
  source 1..36: mol_type = other DNA
tccttttgcccatgattattctcgatgtaaaaacga

SEQ ID NO: 1167 - DNA, 37 bp, synthetic construct
  misc_feature 1..37: note = Synthetic oligonucleotide
  source 1..37: mol_type = other DNA
aacgctaatatctgccgatgggaatcctcgattagga

SEQ ID NO: 1168 - DNA, 37 bp, synthetic construct
  misc_feature 1..37: note = Synthetic oligonucleotide
  source 1..37: mol_type = other DNA
agggtgatatttacgttatcttcgaatttctactgga

SEQ ID NO: 1169 - DNA, 36 bp, synthetic construct
  misc_feature 1..36: note = Synthetic oligonucleotide
  source 1..36: mol_type = other DNA
tctcacttacaaagcgtttaatcaacgcagttctta

SEQ ID NO: 1170 - DNA, 37 bp, synthetic construct
  misc_feature 1..37: note = Synthetic oligonucleotide
  source 1..37: mol_type = other DNA
ccgcaaacttaggggctaataattttcgttatccgga

SEQ ID NO: 1171 - DNA, 37 bp, synthetic construct
  misc_feature 1..37: note = Synthetic oligonucleotide
  source 1..37: mol_type = other DNA
tgccagaaaatcgaatttttatacgtaatggcatgga

SEQ ID NO: 1172 - DNA, 35 bp, synthetic construct
  misc_feature 1..35: note = Synthetic oligonucleotide
  source 1..35: mol_type = other DNA
atcgatcctgacgccgaaaacttgacacgactaaa

SEQ ID NO: 1173 - DNA, 35 bp, synthetic construct
  misc_feature 1..35: note = Synthetic oligonucleotide
  source 1..35: mol_type = other DNA
atgctggtaacttttgcacatcttacttggtaaac

SEQ ID NO: 1174 - DNA, 36 bp, synthetic construct
  misc_feature 1..36: note = Synthetic oligonucleotide
  source 1..36: mol_type = other DNA
gcgattactcagcacccccttacttgtttttaatca

SEQ ID NO: 1175 - DNA, 35 bp, synthetic construct
  misc_feature 1..35: note = Synthetic oligonucleotide
  source 1..35: mol_type = other DNA
actgcgggactatctgaattattggtattataaca

SEQ ID NO: 1176 - DNA, 36 bp, synthetic construct
  misc_feature 1..36: note = Synthetic oligonucleotide
  source 1..36: mol_type = other DNA
gagtactgaaggaactggaaccgagtattcttgtca

SEQ ID NO: 1177 - DNA, 36 bp, synthetic construct
  misc_feature 1..36: note = Synthetic oligonucleotide
  source 1..36: mol_type = other DNA
gagaactgcctggtaatatattcccaaacctggaca

SEQ ID NO: 1178 - DNA, 36 bp, synthetic construct
  misc_feature 1..36: note = Synthetic oligonucleotide
  source 1..36: mol_type = other DNA
gagtgcgtaggtcttacatcctatcgaatatttaca

SEQ ID NO: 1179 - DNA, 36 bp, synthetic construct
  misc_feature 1..36: note = Synthetic oligonucleotide
  source 1..36: mol_type = other DNA
ctcagactttacacaatctttctctccacacaagca

SEQ ID NO: 1180 - DNA, 35 bp, synthetic construct
  misc_feature 1..35: note = Synthetic oligonucleotide
  source 1..35: mol_type = other DNA
gccactttcagaatctcgtgtcacacccatcatca

SEQ ID NO: 1181 - DNA, 36 bp, synthetic construct
  misc_feature 1..36: note = Synthetic oligonucleotide
  source 1..36: mol_type = other DNA
gcgttccccgtggacaatatcactttcttatcgtca

SEQ ID NO: 1182 - DNA, 35 bp, synthetic construct
  misc_feature 1..35: note = Synthetic oligonucleotide
  source 1..35: mol_type = other DNA
tcctggtctacgacttacatctgatccgacccaaa

SEQ ID NO: 1183 - DNA, 36 bp, synthetic construct
  misc_feature 1..36: note = Synthetic oligonucleotide
  source 1..36: mol_type = other DNA
ggaccttatttgttcgacccccgttatcacctgaaa

SEQ ID NO: 1184 - DNA, 35 bp, synthetic construct
  misc_feature 1..35: note = Synthetic oligonucleotide
  source 1..35: mol_type = other DNA
gaggacttttactgatcaaccccacctttcgaaaa

SEQ ID NO: 1185 - DNA, 36 bp, synthetic construct
  misc_feature 1..36: note = Synthetic oligonucleotide
  source 1..36: mol_type = other DNA
gctactacttatccgactactctaaaaacaactaca

SEQ ID NO: 1186 - DNA, 35 bp, synthetic construct
  misc_feature 1..35: note = Synthetic oligonucleotide
  source 1..35: mol_type = other DNA
aactgtcatccgccgactaactcaatctaactcaa

SEQ ID NO: 1187 - DNA, 35 bp, synthetic construct
  misc_feature 1..35: note = Synthetic oligonucleotide
  source 1..35: mol_type = other DNA
aactgtcatccgccgactaactcaatctaactcta

SEQ ID NO: 1188 - DNA, 35 bp, synthetic construct
  misc_feature 1..35: note = Synthetic oligonucleotide
  source 1..35: mol_type = other DNA
aactgtcatccgccgactaactcaatctaactcga

SEQ ID NO: 1189 - DNA, 35 bp, synthetic construct
  misc_feature 1..35: note = Synthetic oligonucleotide
  source 1..35: mol_type = other DNA
tactccggcccaactatatacttctccacaccaac

SEQ ID NO: 1190 - DNA, 35 bp, synthetic construct
  misc_feature 1..35: note = Synthetic oligonucleotide
  source 1..35: mol_type = other DNA
tactccggcccaactatatacttctccacaccatc

SEQ ID NO: 1191 - DNA, 35 bp, synthetic construct
  misc_feature 1..35: note = Synthetic oligonucleotide
  source 1..35: mol_type = other DNA
tactccggcccaactatatacttctccacaccagc

SEQ ID NO: 1192 - DNA, 35 bp, synthetic construct
  misc_feature 1..35: note = Synthetic oligonucleotide
  source 1..35: mol_type = other DNA
tcctacctgcccaatccccttttgattacatatat

SEQ ID NO: 1193 - DNA, 35 bp, synthetic construct
  misc_feature 1..35: note = Synthetic oligonucleotide
  source 1..35: mol_type = other DNA
ccacgctttggggacgctattactatccctttcaa

SEQ ID NO: 1194 - DNA, 35 bp, synthetic construct
  misc_feature 1..35: note = Synthetic oligonucleotide
  source 1..35: mol_type = other DNA
aatgtactgataatcccttttacactggttactat

SEQ ID NO: 1195 - DNA, 35 bp, synthetic construct
  misc_feature 1..35: note = Synthetic oligonucleotide
  source 1..35: mol_type = other DNA
ttagtcgtacttttatctatattgggcctaataaa

SEQ ID NO: 1196 - DNA, 36 bp, synthetic construct
  misc_feature 1..36: note = Synthetic oligonucleotide
  source 1..36: mol_type = other DNA
ttcgccacgttcctaaatattttacttattactaaa

SEQ ID NO: 1197 - DNA, 36 bp, synthetic construct
  misc_feature 1..36: note = Synthetic oligonucleotide
  source 1..36: mol_type = other DNA
ttccatgactctgcctatacttattatatctcataa

SEQ ID NO: 1198 - DNA, 36 bp, synthetic construct
  misc_feature 1..36: note = Synthetic oligonucleotide
  source 1..36: mol_type = other DNA
ttggagctacaatcaaacttcatatctctttctaaa

SEQ ID NO: 1199 - DNA, 36 bp, synthetic construct
  misc_feature 1..36: note = Synthetic oligonucleotide
  source 1..36: mol_type = other DNA
tgcccaaaactgcctttagaaacttattacattcaa

SEQ ID NO: 1200 - DNA, 36 bp, synthetic construct
  misc_feature 1..36: note = Synthetic oligonucleotide
  source 1..36: mol_type = other DNA
tctgcgatcgccatttatctcgaccctttacctaaa

SEQ ID NO: 1201 - DNA, 35 bp, synthetic construct
  misc_feature 1..35: note = Synthetic oligonucleotide
  source 1..35: mol_type = other DNA
aacttttttgcactaacctggacctcatatataat

SEQ ID NO: 1202 - DNA, 34 bp, synthetic construct
  misc_feature 1..34: note = Synthetic oligonucleotide
  source 1..34: mol_type = other DNA
aaccgcttttcacactaccactcacgctctcata

SEQ ID NO: 1203 - DNA, 36 bp, synthetic construct
  misc_feature 1..36: note = Synthetic oligonucleotide
  source 1..36: mol_type = other DNA
ccgccgtacccacgctccaattattctcatcctaca

SEQ ID NO: 1204 - DNA, 36 bp, synthetic construct
  misc_feature 1..36: note = Synthetic oligonucleotide
  source 1..36: mol_type = other DNA
tatctccgtccaacacatctctggtcaccacctcca

SEQ ID NO: 1205 - DNA, 35 bp, synthetic construct
  misc_feature 1..35: note = Synthetic oligonucleotide
  source 1..35: mol_type = other DNA
tttctccgctcatcataactgacgccatccactca

SEQ ID NO: 1206 - DNA, 35 bp, synthetic construct
  misc_feature 1..35: note = Synthetic oligonucleotide
  source 1..35: mol_type = other DNA
acttcgctcattcacttgccaactcctgcacaatc

SEQ ID NO: 1207 - DNA, 37 bp, synthetic construct
  misc_feature 1..37: note = Synthetic oligonucleotide
  source 1..37: mol_type = other DNA
tccctcaccgttgcccttattccgtactcacttatga

SEQ ID NO: 1208 - DNA, 36 bp, synthetic construct
  misc_feature 1..36: note = Synthetic oligonucleotide
  source 1..36: mol_type = other DNA
gtgcttctccttttgactcgcctcactcttggtcca

SEQ ID NO: 1209 - DNA, 36 bp, synthetic construct
  misc_feature 1..36: note = Synthetic oligonucleotide
  source 1..36: mol_type = other DNA
ttttctcctcactccgctccgtgccttgacatcaaa

SEQ ID NO: 1210 - DNA, 37 bp, synthetic construct
  misc_feature 1..37: note = Synthetic oligonucleotide
  source 1..37: mol_type = other DNA
taccttcttcaatatccgtccgcttaacctggattca

SEQ ID NO: 1211 - DNA, 36 bp, synthetic construct
  misc_feature 1..36: note = Synthetic oligonucleotide
  source 1..36: mol_type = other DNA
cctcctctgcctaaatacgttttctccaccatcata

SEQ ID NO: 1212 - DNA, 36 bp, synthetic construct
  misc_feature 1..36: note = Synthetic oligonucleotide
  source 1..36: mol_type = other DNA
acttttttaaattttgttcccacgtatccttaatta

SEQ ID NO: 1213 - DNA, 38 bp, synthetic construct
  misc_feature 1..38: note = Synthetic oligonucleotide
  source 1..38: mol_type = other DNA
ttttccgggtttcttctccagtaggttgacttttatga

SEQ ID NO: 1214 - DNA, 35 bp, synthetic construct
  misc_feature 1..35: note = Synthetic oligonucleotide
  source 1..35: mol_type = other DNA
tgttttggcctccacggtttagtacttattttttt

SEQ ID NO: 1215 - DNA, 35 bp, synthetic construct
  misc_feature 1..35: note = Synthetic oligonucleotide
  source 1..35: mol_type = other DNA
gacttttttgctcatattttcaccaatcaattcca

SEQ ID NO: 1216 - DNA, 36 bp, synthetic construct
  misc_feature 1..36: note = Synthetic oligonucleotide
  source 1..36: mol_type = other DNA
tgagttctcttttatattggtcgccactttttccaa

SEQ ID NO: 1217 - DNA, 36 bp, synthetic construct
  misc_feature 1..36: note = Synthetic oligonucleotide
  source 1..36: mol_type = other DNA
ttccttcacttgggctttcaaatcatttataaacaa

SEQ ID NO: 1218 - DNA, 38 bp, synthetic construct
  misc_feature 1..38: note = Synthetic oligonucleotide
  source 1..38: mol_type = other DNA
ttcttgacttcagttcgattttgttattcttagtttga

SEQ ID NO: 1219 - DNA, 38 bp, synthetic construct
  misc_feature 1..38: note = Synthetic oligonucleotide
  source 1..38: mol_type = other DNA
gttaattccttgctcgagtttttccgcttattccttga

SEQ ID NO: 1220 - DNA, 37 bp, synthetic construct
  misc_feature 1..37: note = Synthetic oligonucleotide
  source 1..37: mol_type = other DNA
ggtacatttcgtccctaccattggtttattcttttga

SEQ ID NO: 1221 - DNA, 37 bp, synthetic construct
  misc_feature 1..37: note = Synthetic oligonucleotide
  source 1..37: mol_type = other DNA
attatttttcgttctctcacttgttttcgatcattga

SEQ ID NO: 1222 - DNA, 35 bp, synthetic construct
  misc_feature 1..35: note = Synthetic oligonucleotide
  source 1..35: mol_type = other DNA
taattgagcttttgctcctaacggcgagagccgtt

SEQ ID NO: 1223 - DNA, 36 bp, synthetic construct
  misc_feature 1..36: note = Synthetic oligonucleotide
  source 1..36: mol_type = other DNA
tgatatacgcgcgagtagaacatcaaccagtgagaa

SEQ ID NO: 1224 - DNA, 38 bp, synthetic construct
  misc_feature 1..38: note = Synthetic oligonucleotide
  source 1..38: mol_type = other DNA
taagccgagcgcatgtaggttcgttttcacgagagtga

SEQ ID NO: 1225 - DNA, 35 bp, synthetic construct
  misc_feature 1..35: note = Synthetic oligonucleotide
  source 1..35: mol_type = other DNA
atgaacgcgagtgaggacgctttagttaattatgt

SEQ ID NO: 1226 - DNA, 37 bp, synthetic construct
  misc_feature 1..37: note = Synthetic oligonucleotide
  source 1..37: mol_type = other DNA
actcggatagcggggccgggggaggcctacacattga

SEQ ID NO: 1227 - DNA, 38 bp, synthetic construct
  misc_feature 1..38: note = Synthetic oligonucleotide
  source 1..38: mol_type = other DNA
acgcagtccgtaaattgataaccgggaggttcgagtga

SEQ ID NO: 1228 - DNA, 35 bp, synthetic construct
  misc_feature 1..35: note = Synthetic oligonucleotide
  source 1..35: mol_type = other DNA
agtcccacgagagtggttctctctagataagagga

SEQ ID NO: 1229 - DNA, 37 bp, synthetic construct
  misc_feature 1..37: note = Synthetic oligonucleotide
  source 1..37: mol_type = other DNA
gagtaccataacaaggcctgaagaaccttgcaggtga

SEQ ID NO: 1230 - DNA, 38 bp, synthetic construct
  misc_feature 1..38: note = Synthetic oligonucleotide
  source 1..38: mol_type = other DNA
gcggggtgtgaacccgctcgtatgtaacaacggattga

SEQ ID NO: 1231 - DNA, 37 bp, synthetic construct
  misc_feature 1..37: note = Synthetic oligonucleotide
  source 1..37: mol_type = other DNA
gagtacggttacggtgagtaaccatttagacgtaaga

SEQ ID NO: 1232 - DNA, 38 bp, synthetic construct
  misc_feature 1..38: note = Synthetic oligonucleotide
  source 1..38: mol_type = other DNA
tgggatccgcgaggatctgatggggttcttatgtttga

SEQ ID NO: 1233 - DNA, 36 bp, synthetic construct
  misc_feature 1..36: note = Synthetic oligonucleotide
  source 1..36: mol_type = other DNA
gagtacccgggcagggagccagttattatgttttga

SEQ ID NO: 1234 - DNA, 36 bp, synthetic construct
  misc_feature 1..36: note = Synthetic oligonucleotide
  source 1..36: mol_type = other DNA
gagtacctagatatctcaaaagatatttatcgttaa

SEQ ID NO: 1235 - DNA, 35 bp, synthetic construct
  misc_feature 1..35: note = Synthetic oligonucleotide
  source 1..35: mol_type = other DNA
gagtactctgcgcaagtgttgaactttgtagaaat

SEQ ID NO: 1236 - DNA, 36 bp, synthetic construct
  misc_feature 1..36: note = Synthetic oligonucleotide
  source 1..36: mol_type = other DNA
gagtacttcccgcggggttatggaatgaattggata

SEQ ID NO: 1237 - DNA, 38 bp, synthetic construct
  misc_feature 1..38: note = Synthetic oligonucleotide
  source 1..38: mol_type = other DNA
taatgtctcttccgccgtagtacgagcggttccgctga

SEQ ID NO: 1238 - DNA, 38 bp, synthetic construct
  misc_feature 1..38: note = Synthetic oligonucleotide
  source 1..38: mol_type = other DNA
gagtacagccgcccttgtaccgaggccttattaagtga

SEQ ID NO: 1239 - DNA, 38 bp, synthetic construct
  misc_feature 1..38: note = Synthetic oligonucleotide
  source 1..38: mol_type = other DNA
ttagtttaccgtcaaaggcctcataatgttacaactga

SEQ ID NO: 1240 - DNA, 38 bp, synthetic construct
  misc_feature 1..38: note = Synthetic oligonucleotide
  source 1..38: mol_type = other DNA
cgtagtattgcgggctcgtctcattgcattcctattga

SEQ ID NO: 1241 - DNA, 38 bp, synthetic construct
  misc_feature 1..38: note = Synthetic oligonucleotide
  source 1..38: mol_type = other DNA
cgtgagacgtggttgcccaccacagtgaataaatttga

SEQ ID NO: 1242 - DNA, 37 bp, synthetic construct
  misc_feature 1..37: note = Synthetic oligonucleotide
  source 1..37: mol_type = other DNA
gctccactatttaaccgtgagttgttaaccgggggga

SEQ ID NO: 1243 - DNA, 37 bp, synthetic construct
  misc_feature 1..37: note = Synthetic oligonucleotide
  source 1..37: mol_type = other DNA
gctccagtaccgctgtacgaattatttaagaaaacga

SEQ ID NO: 1244 - DNA, 36 bp, synthetic construct
  misc_feature 1..36: note = Synthetic oligonucleotide
  source 1..36: mol_type = other DNA
gcccacatttttttcgagtgtgtaaggggtgagaaa

SEQ ID NO: 1245 - DNA, 37 bp, synthetic construct
  misc_feature 1..37: note = Synthetic oligonucleotide
  source 1..37: mol_type = other DNA
gcttattccggatgttgcctgcaattaggggactcga

SEQ ID NO: 1246 - DNA, 37 bp, synthetic construct
  misc_feature 1..37: note = Synthetic oligonucleotide
  source 1..37: mol_type = other DNA
gcttgtctcgcggttttgaaagtaatctttaacgaga

SEQ ID NO: 1247 - DNA, 35 bp, synthetic construct
  misc_feature 1..35: note = Synthetic oligonucleotide
  source 1..35: mol_type = other DNA
gcgcgaaagctcaaataaaactaaagtacaacaaa

SEQ ID NO: 1248 - DNA, 36 bp, synthetic construct
  misc_feature 1..36: note = Synthetic oligonucleotide
  source 1..36: mol_type = other DNA
gctaagctgggagaaaatcacaccctcgatcgtaaa

SEQ ID NO: 1249 - DNA, 37 bp, synthetic construct
  misc_feature 1..37: note = Synthetic oligonucleotide
  source 1..37: mol_type = other DNA
ctcacattagggctcggtaaatataacgatctgacga

SEQ ID NO: 1250 - DNA, 35 bp, synthetic construct
  misc_feature 1..35: note = Synthetic oligonucleotide
  source 1..35: mol_type = other DNA
actgtagctattatgaaagtctgggttattggcct

SEQ ID NO: 1251 - DNA, 35 bp, synthetic construct
  misc_feature 1..35: note = Synthetic oligonucleotide
  source 1..35: mol_type = other DNA
aatcgtatggagcgttgaacaaatgaacccgtagt

SEQ ID NO: 1252 - DNA, 38 bp, synthetic construct
  misc_feature 1..38: note = Synthetic oligonucleotide
  source 1..38: mol_type = other DNA
agatatacttgaaaggtggtattatgaatgttgggtga

SEQ ID NO: 1253 - DNA, 38 bp, synthetic construct
  misc_feature 1..38: note = Synthetic oligonucleotide
  source 1..38: mol_type = other DNA
atggtgactcaattaaaatgtgaggtgggggagctaga

SEQ ID NO: 1254 - DNA, 37 bp, synthetic construct
  misc_feature 1..37: note = Synthetic oligonucleotide
  source 1..37: mol_type = other DNA
tcgtggagggtattgaccttctaatgatgggggggga

SEQ ID NO: 1255 - DNA, 38 bp, synthetic construct
  misc_feature 1..38: note = Synthetic oligonucleotide
  source 1..38: mol_type = other DNA
ggttcctatgaaggacacggggggggaggtatcaatga

SEQ ID NO: 1256 - DNA, 37 bp, synthetic construct
  misc_feature 1..37: note = Synthetic oligonucleotide
  source 1..37: mol_type = other DNA
aaggggcggtagactttaggggctgaatggggtggga

SEQ ID NO: 1257 - DNA, 37 bp, synthetic construct
  misc_feature 1..37: note = Synthetic oligonucleotide
  source 1..37: mol_type = other DNA
gagtgcactggatgaattttgaggggggaaggaccga

SEQ ID NO: 1258 - DNA, 37 bp, synthetic construct
  misc_feature 1..37: note = Synthetic oligonucleotide
  source 1..37: mol_type = other DNA
tgcggtgggtggtgggtgggaaataattatgtgggga

SEQ ID NO: 1259 - DNA, 37 bp, synthetic construct
  misc_feature 1..37: note = Synthetic oligonucleotide
  source 1..37: mol_type = other DNA
taccagactggaagtcaatgatcatggttgtctccga

SEQ ID NO: 1260 - DNA, 36 bp, synthetic construct
  misc_feature 1..36: note = Synthetic oligonucleotide
  source 1..36: mol_type = other DNA
aacggtacaacatctgctagagaactgcaacttcta

SEQ ID NO: 1261 - DNA, 36 bp, synthetic construct
  misc_feature 1..36: note = Synthetic oligonucleotide
  source 1..36: mol_type = other DNA
actatatccaatgctatgcgcgcattcagggtagaa

SEQ ID NO: 1262 - DNA, 35 bp, synthetic construct
  misc_feature 1..35: note = Synthetic oligonucleotide
  source 1..35: mol_type = other DNA
agcatcggccgatcgcctcaatcacgttttcgatt

SEQ ID NO: 1263 - DNA, 38 bp, synthetic construct
  misc_feature 1..38: note = Synthetic oligonucleotide
  source 1..38: mol_type = other DNA
aggcttacaatacgttaccccttcttcgtagacggtga

SEQ ID NO: 1264 - DNA, 36 bp, synthetic construct
  misc_feature 1..36: note = Synthetic oligonucleotide
  source 1..36: mol_type = other DNA
cttgacgtcacatttgcctaacactgtaggtcacaa

SEQ ID NO: 1265 - DNA, 35 bp, synthetic construct
  misc_feature 1..35: note = Synthetic oligonucleotide
  source 1..35: mol_type = other DNA
tctggtagcacatgagtttggcattcctctctgca

SEQ ID NO: 1266 - DNA, 35 bp, synthetic construct
  misc_feature 1..35: note = Synthetic oligonucleotide
  source 1..35: mol_type = other DNA
tgttgtccgtatatattccttgtgtgttaattccg

SEQ ID NO: 1267 - DNA, 35 bp, synthetic construct
  misc_feature 1..35: note = Synthetic oligonucleotide
  source 1..35: mol_type = other DNA
gagcactataagtgtgtatctatttgtaactttct

SEQ ID NO: 1268 - DNA, 35 bp, synthetic construct
  misc_feature 1..35: note = Synthetic oligonucleotide
  source 1..35: mol_type = other DNA
tgtggaggcactcttgtatgattgatttcgtatct

SEQ ID NO: 1269 - DNA, 36 bp, synthetic construct
  misc_feature 1..36: note = Synthetic oligonucleotide
  source 1..36: mol_type = other DNA
aatctaacgcatcaaatacgtttgggtagtcattaa

SEQ ID NO: 1270 - DNA, 35 bp, synthetic construct
  misc_feature 1..35: note = Synthetic oligonucleotide
  source 1..35: mol_type = other DNA
tggtcaacgttatcgtatcctactgatcactaact

SEQ ID NO: 1271 - DNA, 36 bp, synthetic construct
  misc_feature 1..36: note = Synthetic oligonucleotide
  source 1..36: mol_type = other DNA
ttgtcgcaccacatcataggtgccacgatgtcccaa

SEQ ID NO: 1272 - DNA, 36 bp, synthetic construct
  misc_feature 1..36: note = Synthetic oligonucleotide
  source 1..36: mol_type = other DNA
actgttacaacagaagggttagatcacatactacaa

SEQ ID NO: 1273 - DNA, 35 bp, synthetic construct
  misc_feature 1..35: note = Synthetic oligonucleotide
  source 1..35: mol_type = other DNA
actcgagggaactaggaactactacaacagtgtgt

SEQ ID NO: 1274 - DNA, 38 bp, synthetic construct
  misc_feature 1..38: note = Synthetic oligonucleotide
  source 1..38: mol_type = other DNA
ccatgaaactacaacatatcaagtcgagtgtggtgtga

SEQ ID NO: 1275 - DNA, 37 bp, synthetic construct
  misc_feature 1..37: note = Synthetic oligonucleotide
  source 1..37: mol_type = other DNA
cggccgacgtagctcaaattctacactatggttgtga

SEQ ID NO: 1276 - DNA, 38 bp, synthetic construct
  misc_feature 1..38: note = Synthetic oligonucleotide
  source 1..38: mol_type = other DNA
ggcagtactatcaacttacatgccaatattcgatgtga

SEQ ID NO: 1277 - DNA, 36 bp, synthetic construct
  misc_feature 1..36: note = Synthetic oligonucleotide
  source 1..36: mol_type = other DNA
gctaccagcgttgcagtctgcggattctgtcaaata

SEQ ID NO: 1278 - DNA, 35 bp, synthetic construct
  misc_feature 1..35: note = Synthetic oligonucleotide
  source 1..35: mol_type = other DNA
cttactcaaagtggcgtgtaggtcattaggttgta

SEQ ID NO: 1279 - DNA, 36 bp, synthetic construct
  misc_feature 1..36: note = Synthetic oligonucleotide
  source 1..36: mol_type = other DNA
cgtagtactagcaacattagggtcgtaacataacta

SEQ ID NO: 1280 - DNA, 36 bp, synthetic construct
  misc_feature 1..36: note = Synthetic oligonucleotide
  source 1..36: mol_type = other DNA
acgaccgtggggttagggcgcatattctttggctta

SEQ ID NO: 1281 - DNA, 37 bp, synthetic construct
  misc_feature 1..37: note = Synthetic oligonucleotide
  source 1..37: mol_type = other DNA
tactctcatgggtatctttctgaatcgaacgttgtga

SEQ ID NO: 1282 - DNA, 35 bp, synthetic construct
  misc_feature 1..35: note = Synthetic oligonucleotide
  source 1..35: mol_type = other DNA
gcggtttaacctcgaaagtaagggcgattaggcga

SEQ ID NO: 1283 - DNA, 35 bp, synthetic construct
  misc_feature 1..35: note = Synthetic oligonucleotide
  source 1..35: mol_type = other DNA
gcgggttcaaattgaggaggaaagacgaaagctct

SEQ ID NO: 1284 - DNA, 38 bp, synthetic construct
  misc_feature 1..38: note = Synthetic oligonucleotide
  source 1..38: mol_type = other DNA
gatcgaatcgatactgcagcggagtgacacgggtctaa

SEQ ID NO: 1285 - DNA, 35 bp, synthetic construct
  misc_feature 1..35: note = Synthetic oligonucleotide
  source 1..35: mol_type = other DNA
tagtccgggtcgttttaaattcagtttggcatttt

SEQ ID NO: 1286 - DNA, 35 bp, synthetic construct
  misc_feature 1..35: note = Synthetic oligonucleotide
  source 1..35: mol_type = other DNA
aaccaggcatagttggccgcaggcaaccccatttt

SEQ ID NO: 1287 - DNA, 35 bp, synthetic construct
  misc_feature 1..35: note = Synthetic oligonucleotide
  source 1..35: mol_type = other DNA
agtccaaacacgaggttccgtcgcgagaactttaa

SEQ ID NO: 1288 - DNA, 37 bp, synthetic construct
  misc_feature 1..37: note = Synthetic oligonucleotide
  source 1..37: mol_type = other DNA
agtccggcaaggggcgcaacttatcatagtcctctga

SEQ ID NO: 1289 - DNA, 35 bp, synthetic construct
  misc_feature 1..35: note = Synthetic oligonucleotide
  source 1..35: mol_type = other DNA
taggctcccgcctttagcttagtttcagatagcaa

SEQ ID NO: 1290 - DNA, 35 bp, synthetic construct
  misc_feature 1..35: note = Synthetic oligonucleotide
  source 1..35: mol_type = other DNA
cgcggtattttgcctcaaactagtcgttaatctat

SEQ ID NO: 1291 - DNA, 37 bp, synthetic construct
  misc_feature 1..37: note = Synthetic oligonucleotide
  source 1..37: mol_type = other DNA
ttacttcgggagctaggctcacccctacattagtgga

SEQ ID NO: 1292 - DNA, 37 bp, synthetic construct
  misc_feature 1..37: note = Synthetic oligonucleotide
  source 1..37: mol_type = other DNA
agtgcaattggatatatcagtgaggagtttcaattga

SEQ ID NO: 1293 - DNA, 37 bp, synthetic construct
  misc_feature 1..37: note = Synthetic oligonucleotide
  source 1..37: mol_type = other DNA
ccgaaatcggggtagattatggggtcctggaaatcga

SEQ ID NO: 1294 - DNA, 38 bp, synthetic construct
  misc_feature 1..38: note = Synthetic oligonucleotide
  source 1..38: mol_type = other DNA
taagtttgtagaatttaacgtatggaacggggacgtga

SEQ ID NO: 1295 - DNA, 35 bp, synthetic construct
  misc_feature 1..35: note = Synthetic oligonucleotide
  source 1..35: mol_type = other DNA
tgagcgagcgcctgatattcggtactgcatatctc

SEQ ID NO: 1296 - DNA, 36 bp, synthetic construct
  misc_feature 1..36: note = Synthetic oligonucleotide
  source 1..36: mol_type = other DNA
gatcgaattaggggaattcgttggaatcgacccata

SEQ ID NO: 1297 - DNA, 38 bp, synthetic construct
  misc_feature 1..38: note = Synthetic oligonucleotide
  source 1..38: mol_type = other DNA
tctgtgcgaagggtttagtctcgggcgaaacttaatga

SEQ ID NO: 1298 - DNA, 38 bp, synthetic construct
  misc_feature 1..38: note = Synthetic oligonucleotide
  source 1..38: mol_type = other DNA
agggaagtcctagttggagtgattttccgtgattctga

SEQ ID NO: 1299 - DNA, 38 bp, synthetic construct
  misc_feature 1..38: note = Synthetic oligonucleotide
  source 1..38: mol_type = other DNA
aggaatggctagtctaagacaaactcctctgtttatga

SEQ ID NO: 1300 - DNA, 37 bp, synthetic construct
  misc_feature 1..37: note = Synthetic oligonucleotide
  source 1..37: mol_type = other DNA
gattgtcacggatgattctggatttatataggtacga

SEQ ID NO: 1301 - DNA, 38 bp, synthetic construct
  misc_feature 1..38: note = Synthetic oligonucleotide
  source 1..38: mol_type = other DNA
attcatgggagcttgaccggagttattgtttgttgtga

SEQ ID NO: 1302 - DNA, 35 bp, synthetic construct
  misc_feature 1..35: note = Synthetic oligonucleotide
  source 1..35: mol_type = other DNA
tatcgaacttagatgtgacactgttttttagtcta

SEQ ID NO: 1303 - DNA, 37 bp, synthetic construct
  misc_feature 1..37: note = Synthetic oligonucleotide
  source 1..37: mol_type = other DNA
agctacggcttatcgttggggtccaagttcatgaaga

SEQ ID NO: 1304 - DNA, 37 bp, synthetic construct
  misc_feature 1..37: note = Synthetic oligonucleotide
  source 1..37: mol_type = other DNA
agtctaccccccaaattgttggtattccgagcataga

SEQ ID NO: 1305 - DNA, 35 bp, synthetic construct
  misc_feature 1..35: note = Synthetic oligonucleotide
  source 1..35: mol_type = other DNA
tcgtcccaagctctggactggtaagttcttatgta

SEQ ID NO: 1306 - DNA, 36 bp, synthetic construct
  misc_feature 1..36: note = Synthetic oligonucleotide
  source 1..36: mol_type = other DNA
tgctacagttcaacctcacgtttttgaactgcgtga

SEQ ID NO: 1307 - DNA, 37 bp, synthetic construct
  misc_feature 1..37: note = Synthetic oligonucleotide
  source 1..37: mol_type = other DNA
cgtttggacgggggtgtccttttttttgatattacga

SEQ ID NO: 1308 - DNA, 37 bp, synthetic construct
  misc_feature 1..37: note = Synthetic oligonucleotide
  source 1..37: mol_type = other DNA
ttcctcgtgttacaggcactttattagcctgtgggga

SEQ ID NO: 1309 - DNA, 36 bp, synthetic construct
  misc_feature 1..36: note = Synthetic oligonucleotide
  source 1..36: mol_type = other DNA
cttggcccgttgaccacgacataatggtcttatata

SEQ ID NO: 1310 - DNA, 36 bp, synthetic construct
  misc_feature 1..36: note = Synthetic oligonucleotide
  source 1..36: mol_type = other DNA
aggatatttaccctgcatcttttcgttacggtatga

SEQ ID NO: 1311 - DNA, 36 bp, synthetic construct
  misc_feature 1..36: note = Synthetic oligonucleotide
  source 1..36: mol_type = other DNA
actgtctggaagtcggaactttcaccattatgatga

SEQ ID NO: 1312 - DNA, 38 bp, synthetic construct
  misc_feature 1..38: note = Synthetic oligonucleotide
  source 1..38: mol_type = other DNA
gaatggaggaactttctcgtattcacgttttgttgtga

SEQ ID NO: 1313 - DNA, 38 bp, synthetic construct
  misc_feature 1..38: note = Synthetic oligonucleotide
  source 1..38: mol_type = other DNA
aaccgttagtgcaaaggggagtacggcctttgttttga

SEQ ID NO: 1314 - DNA, 38 bp, synthetic construct
  misc_feature 1..38: note = Synthetic oligonucleotide
  source 1..38: mol_type = other DNA
ctcgtacgcaaacgctttgaatagaacgtttgtcttga

SEQ ID NO: 1315 - DNA, 37 bp, synthetic construct
  misc_feature 1..37: note = Synthetic oligonucleotide
  source 1..37: mol_type = other DNA
agatacccggtggttatcttaagggtgtgacttttga

SEQ ID NO: 1316 - DNA, 38 bp, synthetic construct
  misc_feature 1..38: note = Synthetic oligonucleotide
  source 1..38: mol_type = other DNA
tagggttcagtatctggcgattctgttgatgttcctga

SEQ ID NO: 1317 - DNA, 38 bp, synthetic construct
  misc_feature 1..38: note = Synthetic oligonucleotide
  source 1..38: mol_type = other DNA
cgagctcccttaagggtgcatcgggattcattgtttga

SEQ ID NO: 1318 - DNA, 38 bp, synthetic construct
  misc_feature 1..38: note = Synthetic oligonucleotide
  source 1..38: mol_type = other DNA
cacatccggagaaggtgcgtttatacatgaatttctga

SEQ ID NO: 1319 - DNA, 38 bp, synthetic construct
  misc_feature 1..38: note = Synthetic oligonucleotide
  source 1..38: mol_type = other DNA
aaggacgacgcggaacaatctgtagctatgactcttga

SEQ ID NO: 1320 - DNA, 37 bp, synthetic construct
  misc_feature 1..37: note = Synthetic oligonucleotide
  source 1..37: mol_type = other DNA
acttgttcctgaagtgggtttgacttgcaaacgttga

SEQ ID NO: 1321 - DNA, 37 bp, synthetic construct
  misc_feature 1..37: note = Synthetic oligonucleotide
  source 1..37: mol_type = other DNA
agtacacgcccgttggtttcgttcggaaattacttga

SEQ ID NO: 1322 - DNA, 37 bp, synthetic construct
  misc_feature 1..37: note = Synthetic oligonucleotide
  source 1..37: mol_type = other DNA
tgaacatctttgttattcaacgggatcacgcaacgga

SEQ ID NO: 1323 - DNA, 36 bp, synthetic construct
  misc_feature 1..36: note = Synthetic oligonucleotide
  source 1..36: mol_type = other DNA
taatccgatgcaatttgtatttactgacaatgcgta

SEQ ID NO: 1324 - DNA, 36 bp, synthetic construct
  misc_feature 1..36: note = Synthetic oligonucleotide
  source 1..36: mol_type = other DNA
aactggaggatcccggaatttatcctcccatacgaa

SEQ ID NO: 1325 - DNA, 37 bp, synthetic construct
  misc_feature 1..37: note = Synthetic oligonucleotide
  source 1..37: mol_type = other DNA
gaattgcggactgacagatagatgcggtgacattgga

SEQ ID NO: 1326 - DNA, 35 bp, synthetic construct
  misc_feature 1..35: note = Synthetic oligonucleotide
  source 1..35: mol_type = other DNA
tcgcactagttctatgagggaaactacaggaacga

SEQ ID NO: 1327 - DNA, 37 bp, synthetic construct
  misc_feature 1..37: note = Synthetic oligonucleotide
  source 1..37: mol_type = other DNA
gattgacctggaaggcaatagctggtcaacgactgga

SEQ ID NO: 1328 - DNA, 37 bp, synthetic construct
  misc_feature 1..37: note = Synthetic oligonucleotide
  source 1..37: mol_type = other DNA
gcagtacggcacgagggatactctgccctatatatga

SEQ ID NO: 1329 - DNA, 37 bp, synthetic construct
  misc_feature 1..37: note = Synthetic oligonucleotide
  source 1..37: mol_type = other DNA
gccatcatggatatatgcacgtatggtgcttttagga

SEQ ID NO: 1330 - DNA, 38 bp, synthetic construct
  misc_feature 1..38: note = Synthetic oligonucleotide
  source 1..38: mol_type = other DNA
tgcgaaactctagatgattatgattaaacttgtactga

SEQ ID NO: 1331 - DNA, 37 bp, synthetic construct
  misc_feature 1..37: note = Synthetic oligonucleotide
  source 1..37: mol_type = other DNA
aactgaccccattgggtcacccgtgatagttatcgga

SEQ ID NO: 1332 - DNA, 38 bp, synthetic construct
  misc_feature 1..38: note = Synthetic oligonucleotide
  source 1..38: mol_type = other DNA
gtactgctctaggagaaaataaccgtatgaaacgatga

SEQ ID NO: 1333 - DNA, 38 bp, synthetic construct
  misc_feature 1..38: note = Synthetic oligonucleotide
  source 1..38: mol_type = other DNA
ttgcgtatttgccttagaacgcaataaagcatttgtga

SEQ ID NO: 1334 - DNA, 38 bp, synthetic construct
  misc_feature 1..38: note = Synthetic oligonucleotide
  source 1..38: mol_type = other DNA
atctacactggaactgacagggggtagtagtatcctga

SEQ ID NO: 1335 - DNA, 38 bp, synthetic construct
  misc_feature 1..38: note = Synthetic oligonucleotide
  source 1..38: mol_type = other DNA
tagggattgaatctcctctaacattcgacaacaggtga

SEQ ID NO: 1336 - DNA, 38 bp, synthetic construct
  misc_feature 1..38: note = Synthetic oligonucleotide
  source 1..38: mol_type = other DNA
agcgttcaacgcggttgagtgggtgccgaactatatga

SEQ ID NO: 1337 - DNA, 38 bp, synthetic construct
  misc_feature 1..38: note = Synthetic oligonucleotide
  source 1..38: mol_type = other DNA
ggacctgatgccatttagtgtggataatgttattgtga

SEQ ID NO: 1338 - DNA, 35 bp, synthetic construct
  misc_feature 1..35: note = Synthetic oligonucleotide
  source 1..35: mol_type = other DNA
tgatatctaggaaccatgcggtaatggtccgagta

SEQ ID NO: 1339 - DNA, 37 bp, synthetic construct
  misc_feature 1..37: note = Synthetic oligonucleotide
  source 1..37: mol_type = other DNA
tgaaagccgtgactggtattaacggcaaataacggga

SEQ ID NO: 1340 - DNA, 36 bp, synthetic construct
  misc_feature 1..36: note = Synthetic oligonucleotide
  source 1..36: mol_type = other DNA
tgcatgatacgggcttcaaggagcttcttattcgta

SEQ ID NO: 1341 - DNA, 37 bp, synthetic construct
  misc_feature 1..37: note = Synthetic oligonucleotide
  source 1..37: mol_type = other DNA
agacacattgtgtgcaacatggaagtggtctttagga

SEQ ID NO: 1342 - DNA, 38 bp, synthetic construct
  misc_feature 1..38: note = Synthetic oligonucleotide
  source 1..38: mol_type = other DNA
gagttgctctatgtacttcctgagggggtatgtgatga

SEQ ID NO: 1343 - DNA, 37 bp, synthetic construct
  misc_feature 1..37: note = Synthetic oligonucleotide
  source 1..37: mol_type = other DNA
cctgttatctatacttgcgtgagcaaattactttaga

SEQ ID NO: 1344 - DNA, 38 bp, synthetic construct
  misc_feature 1..38: note = Synthetic oligonucleotide
  source 1..38: mol_type = other DNA
tggagtacgcgtgcgttacagtccgaataaggctttga

SEQ ID NO: 1345 - DNA, 38 bp, synthetic construct
  misc_feature 1..38: note = Synthetic oligonucleotide
  source 1..38: mol_type = other DNA
cacagtcaggcgtaatgagaatgagcactttggtttga

SEQ ID NO: 1346 - DNA, 36 bp, synthetic construct
  misc_feature 1..36: note = Synthetic oligonucleotide
  source 1..36: mol_type = other DNA
tcatttacgtgagtaacctggcttagtatcggagta

SEQ ID NO: 1347 - DNA, 38 bp, synthetic construct
  misc_feature 1..38: note = Synthetic oligonucleotide
  source 1..38: mol_type = other DNA
gatggaacgtagcgaaaccgggtttacgcgtgatctga

SEQ ID NO: 1348 - DNA, 37 bp, synthetic construct
  misc_feature 1..37: note = Synthetic oligonucleotide
  source 1..37: mol_type = other DNA
taattatcgtcgtgagatcgatactacggttgtgcga

SEQ ID NO: 1349 - DNA, 35 bp, synthetic construct
  misc_feature 1..35: note = Synthetic oligonucleotide
  source 1..35: mol_type = other DNA
gaggactggcattaccgtggtcagctaaactagac

SEQ ID NO: 1350 - DNA, 37 bp, synthetic construct
  misc_feature 1..37: note = Synthetic oligonucleotide
  source 1..37: mol_type = other DNA
tgcagcatacctaattgttcaccgttgggaaaggtga

SEQ ID NO: 1351 - DNA, 36 bp, synthetic construct
  misc_feature 1..36: note = Synthetic oligonucleotide
  source 1..36: mol_type = other DNA
agctttgtaatacgtgagtttgggtaggtcatcgta

SEQ ID NO: 1352 - DNA, 35 bp, synthetic construct
  misc_feature 1..35: note = Synthetic oligonucleotide
  source 1..35: mol_type = other DNA
cctgcgtcctaaacggataacgaaaacgaatactc

SEQ ID NO: 1353 - DNA, 35 bp, synthetic construct
  misc_feature 1..35: note = Synthetic oligonucleotide
  source 1..35: mol_type = other DNA
ccctgcacgaacgaaccggaataaatcgatggtga

SEQ ID NO: 1354 - DNA, 36 bp, synthetic construct
  misc_feature 1..36: note = Synthetic oligonucleotide
  source 1..36: mol_type = other DNA
gcgcttttctcaaccgacgaccatcgaatagaagaa

SEQ ID NO: 1355 - DNA, 36 bp, synthetic construct
  misc_feature 1..36: note = Synthetic oligonucleotide
  source 1..36: mol_type = other DNA
ttaggctaaggaacgggacccattcgatgaaaatca

SEQ ID NO: 1356 - DNA, 36 bp, synthetic construct
  misc_feature 1..36: note = Synthetic oligonucleotide
  source 1..36: mol_type = other DNA
tcggagtttgcaatccggcaattattagattacaca

SEQ ID NO: 1357 - DNA, 35 bp, synthetic construct
  misc_feature 1..35: note = Synthetic oligonucleotide
  source 1..35: mol_type = other DNA
accggaaatgaaccgtcgcttattccacgaattag

SEQ ID NO: 1358 - DNA, 35 bp, synthetic construct
  misc_feature 1..35: note = Synthetic oligonucleotide
  source 1..35: mol_type = other DNA
gagaattgcggtaaatttcggggcaatatcctctc

SEQ ID NO: 1359 - DNA, 36 bp, synthetic construct
  misc_feature 1..36: note = Synthetic oligonucleotide
  source 1..36: mol_type = other DNA
acgccccgaatgatcggtgggctgtattttacaata

SEQ ID NO: 1360 - DNA, 37 bp, synthetic construct
  misc_feature 1..37: note = Synthetic oligonucleotide
  source 1..37: mol_type = other DNA
gagtagtgggctcacgggggcagtatatcggatacga

SEQ ID NO: 1361 - DNA, 36 bp, synthetic construct
  misc_feature 1..36: note = Synthetic oligonucleotide
  source 1..36: mol_type = other DNA
gagtgcgatggcgtccacggggatttttcggaataa

SEQ ID NO: 1362 - DNA, 36 bp, synthetic construct
  misc_feature 1..36: note = Synthetic oligonucleotide
  source 1..36: mol_type = other DNA
accacgtacaaggaagttaggattcggggaccgtga

SEQ ID NO: 1363 - DNA, 35 bp, synthetic construct
  misc_feature 1..35: note = Synthetic oligonucleotide
  source 1..35: mol_type = other DNA
gaaagctcaagctaatgagaatacgatcatacacc

SEQ ID NO: 1364 - DNA, 36 bp, synthetic construct
  misc_feature 1..36: note = Synthetic oligonucleotide
  source 1..36: mol_type = other DNA
aggacgacgaatttactctaggggtgggctggttaa

SEQ ID NO: 1365 - DNA, 37 bp, synthetic construct
  misc_feature 1..37: note = Synthetic oligonucleotide
  source 1..37: mol_type = other DNA
gtacactggtgtgattgttgtggtggagttggtaaga

SEQ ID NO: 1366 - DNA, 36 bp, synthetic construct
  misc_feature 1..36: note = Synthetic oligonucleotide
  source 1..36: mol_type = other DNA
gggtagtacggggagcactgggctagattgtgacta

SEQ ID NO: 1367 - DNA, 35 bp, synthetic construct
  misc_feature 1..35: note = Synthetic oligonucleotide
  source 1..35: mol_type = other DNA
ggtggaacgggggttgggattgtaagggagtatgt

SEQ ID NO: 1368 - DNA, 37 bp, synthetic construct
  misc_feature 1..37: note = Synthetic oligonucleotide
  source 1..37: mol_type = other DNA
acggtaaaaagggcaatgcttggcgtctatcagacga

SEQ ID NO: 1369 - DNA, 35 bp, synthetic construct
  misc_feature 1..35: note = Synthetic oligonucleotide
  source 1..35: mol_type = other DNA
gtgtggaccggctagtaaaggctgttggggtaatt

SEQ ID NO: 1370 - DNA, 35 bp, synthetic construct
  misc_feature 1..35: note = Synthetic oligonucleotide
  source 1..35: mol_type = other DNA
gcctatcggtggatagtttggtcattcattggagc

SEQ ID NO: 1371 - DNA, 37 bp, synthetic construct
  misc_feature 1..37: note = Synthetic oligonucleotide
  source 1..37: mol_type = other DNA
actctccatgggtggggctcccgaaagaatttctaga

SEQ ID NO: 1372 - DNA, 37 bp, synthetic construct
  misc_feature 1..37: note = Synthetic oligonucleotide
  source 1..37: mol_type = other DNA
ttaaagccatcaaaatctatctaaagttgtagaagga

SEQ ID NO: 1373 - DNA, 37 bp, synthetic construct
  misc_feature 1..37: note = Synthetic oligonucleotide
  source 1..37: mol_type = other DNA
gtctacataatttgtatacggtttaaaatctcgagga

SEQ ID NO: 1374 - DNA, 38 bp, synthetic construct
  misc_feature 1..38: note = Synthetic oligonucleotide
  source 1..38: mol_type = other DNA
tctcggagtagaatccaccagaatcacaggaattctga

SEQ ID NO: 1375 - DNA, 35 bp, synthetic construct
  misc_feature 1..35: note = Synthetic oligonucleotide
  source 1..35: mol_type = other DNA
gaaaggtgccaatcgccggtacacaatttaggaaa

SEQ ID NO: 1376 - DNA, 35 bp, synthetic construct
  misc_feature 1..35: note = Synthetic oligonucleotide
  source 1..35: mol_type = other DNA
cataaacaccttatgaatttatgtagaaatcgaaa

SEQ ID NO: 1377 - DNA, 34 bp, synthetic construct
  misc_feature 1..34: note = Synthetic oligonucleotide
  source 1..34: mol_type = other DNA
gaaccgaagtagtagatttaattatacataatgt

SEQ ID NO: 1378 - DNA, 36 bp, synthetic construct
  misc_feature 1..36: note = Synthetic oligonucleotide
  source 1..36: mol_type = other DNA
gccgcaatacaaacgagaggcttctcccgattaata

SEQ ID NO: 1379 - DNA, 35 bp, synthetic construct
  misc_feature 1..35: note = Synthetic oligonucleotide
  source 1..35: mol_type = other DNA
acctgcggaatatcgtgagaattgaaaaaagcaaa

SEQ ID NO: 1380 - DNA, 38 bp, synthetic construct
  misc_feature 1..38: note = Synthetic oligonucleotide
  source 1..38: mol_type = other DNA
taggcgaatcgaaaaaaagtaatcattatgggttgtga

SEQ ID NO: 1381 - DNA, 37 bp, synthetic construct
  misc_feature 1..37: note = Synthetic oligonucleotide
  source 1..37: mol_type = other DNA
ataccggaccaaggacgccggggtactaaggactcga

SEQ ID NO: 1382 - DNA, 37 bp, synthetic construct
  misc_feature 1..37: note = Synthetic oligonucleotide
  source 1..37: mol_type = other DNA
cgcataatagtcgacgtttttttttgtcggattcgga

SEQ ID NO: 1383 - DNA, 38 bp, synthetic construct
  misc_feature 1..38: note = Synthetic oligonucleotide
  source 1..38: mol_type = other DNA
acaggaaggccaaagtttttccaaggtcgattgcctga

SEQ ID NO: 1384 - DNA, 36 bp, synthetic construct
  misc_feature 1..36: note = Synthetic oligonucleotide
  source 1..36: mol_type = other DNA
gaaatcgtttggtaatttagttcggaacccagggta

SEQ ID NO: 1385 - DNA, 35 bp, synthetic construct
  misc_feature 1..35: note = Synthetic oligonucleotide
  source 1..35: mol_type = other DNA
aaaacgtctcatgcggcctttcgagggcatatctc

SEQ ID NO: 1386 - DNA, 38 bp, synthetic construct
  misc_feature 1..38: note = Synthetic oligonucleotide
  source 1..38: mol_type = other DNA
aaggttcgagaattctcactgcagatcatccgtcatga

SEQ ID NO: 1387 - DNA, 35 bp, synthetic construct
  misc_feature 1..35: note = Synthetic oligonucleotide
  source 1..35: mol_type = other DNA
agtgctctctcttgggggtagtcatccagaatagt

SEQ ID NO: 1388 - DNA, 35 bp, synthetic construct
  misc_feature 1..35: note = Synthetic oligonucleotide
  source 1..35: mol_type = other DNA
taagtcccaatttatttgaagacgttgtaatcgtc

SEQ ID NO: 1389 - DNA, 36 bp, synthetic construct
  misc_feature 1..36: note = Synthetic oligonucleotide
  source 1..36: mol_type = other DNA
aaaacaggctaaaaaggtacatccccattttgctta

SEQ ID NO: 1390 - DNA, 37 bp, synthetic construct
  misc_feature 1..37: note = Synthetic oligonucleotide
  source 1..37: mol_type = other DNA
gtgcgcaaggtttagcgcatacgtagttgaataccga

SEQ ID NO: 1391 - DNA, 37 bp, synthetic construct
  misc_feature 1..37: note = Synthetic oligonucleotide
  source 1..37: mol_type = other DNA
ttccaagtacccaggtttagacctgggacgatagcga

SEQ ID NO: 1392 - DNA, 35 bp, synthetic construct
  misc_feature 1..35: note = Synthetic oligonucleotide
  source 1..35: mol_type = other DNA
tttccaccaaccctgatttgaaaaagacacgcaaa

SEQ ID NO: 1393 - DNA, 35 bp, synthetic construct
  misc_feature 1..35: note = Synthetic oligonucleotide
  source 1..35: mol_type = other DNA
ctccgcccaacgagagttctacgtaaagatcaaac

SEQ ID NO: 1394 - DNA, 37 bp, synthetic construct
  misc_feature 1..37: note = Synthetic oligonucleotide
  source 1..37: mol_type = other DNA
tgtcccgcgcttgacatcatcctaagattaaagaaga

SEQ ID NO: 1395 - DNA, 35 bp, synthetic construct
  misc_feature 1..35: note = Synthetic oligonucleotide
  source 1..35: mol_type = other DNA
attaccgttaatttaaagtacccacgggttgttgg

SEQ ID NO: 1396 - DNA, 37 bp, synthetic construct
  misc_feature 1..37: note = Synthetic oligonucleotide
  source 1..37: mol_type = other DNA
gcatcgtggaaagattctcttataatcaattggggga

SEQ ID NO: 1397 - DNA, 35 bp, synthetic construct
  misc_feature 1..35: note = Synthetic oligonucleotide
  source 1..35: mol_type = other DNA
acacacacggggtagatcacataggcaaacgcttg

SEQ ID NO: 1398 - DNA, 36 bp, synthetic construct
  misc_feature 1..36: note = Synthetic oligonucleotide
  source 1..36: mol_type = other DNA
acaaacgtactaagggcgaagccttttactcgcgca

SEQ ID NO: 1399 - DNA, 38 bp, synthetic construct
  misc_feature 1..38: note = Synthetic oligonucleotide
  source 1..38: mol_type = other DNA
cgtgcaaaccgctgtaagcattcaaaccaactggatga

SEQ ID NO: 1400 - DNA, 35 bp, synthetic construct
  misc_feature 1..35: note = Synthetic oligonucleotide
  source 1..35: mol_type = other DNA
acacaaacacaatctaggagttaaatacagttgga

SEQ ID NO: 1401 - DNA, 35 bp, synthetic construct
  misc_feature 1..35: note = Synthetic oligonucleotide
  source 1..35: mol_type = other DNA
actttcacgatgttgggggggcccaattacagatg

SEQ ID NO: 1402 - DNA, 35 bp, synthetic construct
  misc_feature 1..35: note = Synthetic oligonucleotide
  source 1..35: mol_type = other DNA
acgtttagattaagttcgcttatgaatgtgggatt

SEQ ID NO: 1403 - DNA, 37 bp, synthetic construct
  misc_feature 1..37: note = Synthetic oligonucleotide
  source 1..37: mol_type = other DNA
attgccgttgatgttcgtgattttattaagtggggga

SEQ ID NO: 1404 - DNA, 37 bp, synthetic construct
  misc_feature 1..37: note = Synthetic oligonucleotide
  source 1..37: mol_type = other DNA
gttcttaggcctgttgttaccaggattttcgtgtaga

SEQ ID NO: 1405 - DNA, 36 bp, synthetic construct
  misc_feature 1..36: note = Synthetic oligonucleotide
  source 1..36: mol_type = other DNA
agtccggatacctgtttgtatgcgaaagggaattta

SEQ ID NO: 1406 - DNA, 35 bp, synthetic construct
  misc_feature 1..35: note = Synthetic oligonucleotide
  source 1..35: mol_type = other DNA
gttaatgtcaatctgaaccgacgtgagtattcggc

SEQ ID NO: 1407 - DNA, 37 bp, synthetic construct
  misc_feature 1..37: note = Synthetic oligonucleotide
  source 1..37: mol_type = other DNA
accacggttgggttgcggctaacgtatagccgatgga

SEQ ID NO: 1408 - DNA, 36 bp, synthetic construct
  misc_feature 1..36: note = Synthetic oligonucleotide
  source 1..36: mol_type = other DNA
gtgccttggttgtaattggactttatggctacctaa

SEQ ID NO: 1409 - DNA, 38 bp, synthetic construct
  misc_feature 1..38: note = Synthetic oligonucleotide
  source 1..38: mol_type = other DNA
gatttgcgagtgtgaaacgaattatagcacacgtctga

SEQ ID NO: 1410 - DNA, 35 bp, synthetic construct
  misc_feature 1..35: note = Synthetic oligonucleotide
  source 1..35: mol_type = other DNA
atgctggtgaaccaaactcaagcatgacatttaag

SEQ ID NO: 1411 - DNA, 36 bp, synthetic construct
  misc_feature 1..36: note = Synthetic oligonucleotide
  source 1..36: mol_type = other DNA
cctgcccacgaattgtatatgtaattgcactatcga

SEQ ID NO: 1412 - DNA, 35 bp, synthetic construct
  misc_feature 1..35: note = Synthetic oligonucleotide
  source 1..35: mol_type = other DNA
tctgcaggacttttgattcgtgggttcaacctcat

SEQ ID NO: 1413 - DNA, 37 bp, synthetic construct
  misc_feature 1..37: note = Synthetic oligonucleotide
  source 1..37: mol_type = other DNA
gcacattatgtcacgtagaggcacagtcggtaatcga

SEQ ID NO: 1414 - DNA, 36 bp, synthetic construct
  misc_feature 1..36: note = Synthetic oligonucleotide
  source 1..36: mol_type = other DNA
gggctacgttatcccattcaattcgaattaaatgta

SEQ ID NO: 1415 - DNA, 36 bp, synthetic construct
  misc_feature 1..36: note = Synthetic oligonucleotide
  source 1..36: mol_type = other DNA
acattgccgaattaattcgttgtcgaggaaagacaa

SEQ ID NO: 1416 - DNA, 35 bp, synthetic construct
  misc_feature 1..35: note = Synthetic oligonucleotide
  source 1..35: mol_type = other DNA
cccacgtgttacgggttttatcatgacatcactat

SEQ ID NO: 1417 - DNA, 35 bp, synthetic construct
  misc_feature 1..35: note = Synthetic oligonucleotide
  source 1..35: mol_type = other DNA
catgcacgttttattgtggaaatgtaagcttgggc

SEQ ID NO: 1418 - DNA, 37 bp, synthetic construct
  misc_feature 1..37: note = Synthetic oligonucleotide
  source 1..37: mol_type = other DNA
tgcaagggaaatacgttcctgtgttgtttcgatgaga

SEQ ID NO: 1419 - DNA, 35 bp, synthetic construct
  misc_feature 1..35: note = Synthetic oligonucleotide
  source 1..35: mol_type = other DNA
tgggcagtctctatttgtcattacggttttatgtc

SEQ ID NO: 1420 - DNA, 38 bp, synthetic construct
  misc_feature 1..38: note = Synthetic oligonucleotide
  source 1..38: mol_type = other DNA
agcaggcaacagtatcagccctatttgtcgtaaaatga

SEQ ID NO: 1421 - DNA, 38 bp, synthetic construct
  misc_feature 1..38: note = Synthetic oligonucleotide
  source 1..38: mol_type = other DNA
ggctacgggaaagatgtcacgtctgtttcatttgatga

SEQ ID NO: 1422 - DNA, 35 bp, synthetic construct
  misc_feature 1..35: note = Synthetic oligonucleotide
  source 1..35: mol_type = other DNA
actacgttttaatttcagtaacccatccgatgctc

SEQ ID NO: 1423 - DNA, 36 bp, synthetic construct
  misc_feature 1..36: note = Synthetic oligonucleotide
  source 1..36: mol_type = other DNA
aacaaacgccaaccatatggtaggattcctctttta

SEQ ID NO: 1424 - DNA, 36 bp, synthetic construct
  misc_feature 1..36: note = Synthetic oligonucleotide
  source 1..36: mol_type = other DNA
tgataaccatcggtacctcaccgctcccaactctta

SEQ ID NO: 1425 - DNA, 36 bp, synthetic construct
  misc_feature 1..36: note = Synthetic oligonucleotide
  source 1..36: mol_type = other DNA
cgaaccgacgaaatttccacaccgctttgtatgtta

SEQ ID NO: 1426 - DNA, 35 bp, synthetic construct
  misc_feature 1..35: note = Synthetic oligonucleotide
  source 1..35: mol_type = other DNA
tacctcatgtttgtcactatggaaatcatcccgac

SEQ ID NO: 1427 - DNA, 36 bp, synthetic construct
  misc_feature 1..36: note = Synthetic oligonucleotide
  source 1..36: mol_type = other DNA
agttatttctcgccacataacactctatggaaacta

SEQ ID NO: 1428 - DNA, 36 bp, synthetic construct
  misc_feature 1..36: note = Synthetic oligonucleotide
  source 1..36: mol_type = other DNA
atctcggatttcccgtaggtcactggcacatttcta

SEQ ID NO: 1429 - DNA, 37 bp, synthetic construct
  misc_feature 1..37: note = Synthetic oligonucleotide
  source 1..37: mol_type = other DNA
aattttccgctgggacgaatttctaaccctatttgga

SEQ ID NO: 1430 - DNA, 35 bp, synthetic construct
  misc_feature 1..35: note = Synthetic oligonucleotide
  source 1..35: mol_type = other DNA
gaagcaccgaatcacctggcatggccctttatcta

SEQ ID NO: 1431 - DNA, 35 bp, synthetic construct
  misc_feature 1..35: note = Synthetic oligonucleotide
  source 1..35: mol_type = other DNA
actgccgacgcacaacttgggtggggctctaattt

SEQ ID NO: 1432 - DNA, 35 bp, synthetic construct
  misc_feature 1..35: note = Synthetic oligonucleotide
  source 1..35: mol_type = other DNA
ttcgctgacctcaccggacatatcatttaaagcta

SEQ ID NO: 1433 - DNA, 35 bp, synthetic construct
  misc_feature 1..35: note = Synthetic oligonucleotide
  source 1..35: mol_type = other DNA
tcccttattatgcgaaacaaatatgtagttcttac

SEQ ID NO: 1434 - DNA, 35 bp, synthetic construct
  misc_feature 1..35: note = Synthetic oligonucleotide
  source 1..35: mol_type = other DNA
tctaaaactcacgctaggtggtacaaccgattcta

SEQ ID NO: 1435 - DNA, 36 bp, synthetic construct
  misc_feature 1..36: note = Synthetic oligonucleotide
  source 1..36: mol_type = other DNA
gtagccaacgaagctcgcgtattctatttgccctta

SEQ ID NO: 1436 - DNA, 36 bp, synthetic construct
  misc_feature 1..36: note = Synthetic oligonucleotide
  source 1..36: mol_type = other DNA
acctcaccaagtccttaaggattctgtattcataaa

SEQ ID NO: 1437 - DNA, 35 bp, synthetic construct
  misc_feature 1..35: note = Synthetic oligonucleotide
  source 1..35: mol_type = other DNA
agaatctggctattgatccccacacattgcgaaaa

SEQ ID NO: 1438 - DNA, 35 bp, synthetic construct
  misc_feature 1..35: note = Synthetic oligonucleotide
  source 1..35: mol_type = other DNA
acctaccaatctagatccgcttttatggattgctc

SEQ ID NO: 1439 - DNA, 35 bp, synthetic construct
  misc_feature 1..35: note = Synthetic oligonucleotide
  source 1..35: mol_type = other DNA
gacttctaaacacatggggtgcccgcaacatattt

SEQ ID NO: 1440 - DNA, 38 bp, synthetic construct
  misc_feature 1..38: note = Synthetic oligonucleotide
  source 1..38: mol_type = other DNA
tccagaacgtcagctctccatacgcaattaattcatga

SEQ ID NO: 1441 - DNA, 35 bp, synthetic construct
  misc_feature 1..35: note = Synthetic oligonucleotide
  source 1..35: mol_type = other DNA
gacggccttataaggcactcctcattcatttaata

SEQ ID NO: 1442 - DNA, 38 bp, synthetic construct
  misc_feature 1..38: note = Synthetic oligonucleotide
  source 1..38: mol_type = other DNA
gggacctgcaagcctatcaacgggttatacatttgtga

SEQ ID NO: 1443 - DNA, 36 bp, synthetic construct
  misc_feature 1..36: note = Synthetic oligonucleotide
  source 1..36: mol_type = other DNA
tacacttccatttgatgcgctcaccttgaatctgta

SEQ ID NO: 1444 - DNA, 36 bp, synthetic construct
  misc_feature 1..36: note = Synthetic oligonucleotide
  source 1..36: mol_type = other DNA
aatcgaactcattactttccaatggacctgggagaa

SEQ ID NO: 1445 - DNA, 36 bp, synthetic construct
  misc_feature 1..36: note = Synthetic oligonucleotide
  source 1..36: mol_type = other DNA
agtttacgagttacactacaacggacgaatctttta

SEQ ID NO: 1446 - DNA, 35 bp, synthetic construct
  misc_feature 1..35: note = Synthetic oligonucleotide
  source 1..35: mol_type = other DNA
aacttttctggctttatacacatacggttgccatt

SEQ ID NO: 1447 - DNA, 36 bp, synthetic construct
  misc_feature 1..36: note = Synthetic oligonucleotide
  source 1..36: mol_type = other DNA
agaactgggccttggaatcacacacctaactagtta

SEQ ID NO: 1448 - DNA, 36 bp, synthetic construct
  misc_feature 1..36: note = Synthetic oligonucleotide
  source 1..36: mol_type = other DNA
attcgcactaataacatgttgctccattcaacctaa

SEQ ID NO: 1449 - DNA, 35 bp, synthetic construct
  misc_feature 1..35: note = Synthetic oligonucleotide
  source 1..35: mol_type = other DNA
tatctgctgttttctctggtgccaataactacatc

SEQ ID NO: 1450 - DNA, 37 bp, synthetic construct
  misc_feature 1..37: note = Synthetic oligonucleotide
  source 1..37: mol_type = other DNA
ttgcacataattttctgctttaaccaagcgaacccga

SEQ ID NO: 1451 - DNA, 35 bp, synthetic construct
  misc_feature 1..35: note = Synthetic oligonucleotide
  source 1..35: mol_type = other DNA
taaaattctgaaaatacacgtgtctttcgcattac

SEQ ID NO: 1452 - DNA, 35 bp, synthetic construct
  misc_feature 1..35: note = Synthetic oligonucleotide
  source 1..35: mol_type = other DNA
tcccgaacacatcccccttttaagggctttgctaa

SEQ ID NO: 1453 - DNA, 38 bp, synthetic construct
  misc_feature 1..38: note = Synthetic oligonucleotide
  source 1..38: mol_type = other DNA
aaccacacggggctctcatcgatacttctagtgattga

SEQ ID NO: 1454 - DNA, 35 bp, synthetic construct
  misc_feature 1..35: note = Synthetic oligonucleotide
  source 1..35: mol_type = other DNA
atctagaattccgtttgcgcgagtaacttccctgt

SEQ ID NO: 1455 - DNA, 36 bp, synthetic construct
  misc_feature 1..36: note = Synthetic oligonucleotide
  source 1..36: mol_type = other DNA
cccgcttatcgctagtacctcatttagaattggaaa

SEQ ID NO: 1456 - DNA, 36 bp, synthetic construct
  misc_feature 1..36: note = Synthetic oligonucleotide
  source 1..36: mol_type = other DNA
acctgtaaatttggctcacttttcctttacactgga

SEQ ID NO: 1457 - DNA, 35 bp, synthetic construct
  misc_feature 1..35: note = Synthetic oligonucleotide
  source 1..35: mol_type = other DNA
aatagtatcacacctatctggcttcctgtacccgt

SEQ ID NO: 1458 - DNA, 38 bp, synthetic construct
  misc_feature 1..38: note = Synthetic oligonucleotide
  source 1..38: mol_type = other DNA
acccacccttgagcaccattaaatagtgatttcgctga

SEQ ID NO: 1459 - DNA, 37 bp, synthetic construct
  misc_feature 1..37: note = Synthetic oligonucleotide
  source 1..37: mol_type = other DNA
tcacgaaccctttagctctattttgtttgacgcatga

SEQ ID NO: 1460 - DNA, 37 bp, synthetic construct
  misc_feature 1..37: note = Synthetic oligonucleotide
  source 1..37: mol_type = other DNA
gaggaacgtttctcccctcaacatttaaataaacaga

SEQ ID NO: 1461 - DNA, 35 bp, synthetic construct
  misc_feature 1..35: note = Synthetic oligonucleotide
  source 1..35: mol_type = other DNA
atcctacgcataattctcgaggatctatttcgaaa

SEQ ID NO: 1462 - DNA, 36 bp, synthetic construct
  misc_feature 1..36: note = Synthetic oligonucleotide
  source 1..36: mol_type = other DNA
tgcccgcaattacccctagatccacagcttggttta

SEQ ID NO: 1463 - DNA, 38 bp, synthetic construct
  misc_feature 1..38: note = Synthetic oligonucleotide
  source 1..38: mol_type = other DNA
ggctcttatacaaaacattgggttctcgacctccctga

SEQ ID NO: 1464 - DNA, 36 bp, synthetic construct
  misc_feature 1..36: note = Synthetic oligonucleotide
  source 1..36: mol_type = other DNA
gtgagctgctaatatttatcctgaacttgcttacga

SEQ ID NO: 1465 - DNA, 35 bp, synthetic construct
  misc_feature 1..35: note = Synthetic oligonucleotide
  source 1..35: mol_type = other DNA
agttaccttacaacgaggtttcttgaatggattct

SEQ ID NO: 1466 - DNA, 35 bp, synthetic construct
  misc_feature 1..35: note = Synthetic oligonucleotide
  source 1..35: mol_type = other DNA
ttacaccatccctacgcggtaatagcaactctgtt

SEQ ID NO: 1467 - DNA, 36 bp, synthetic construct
  misc_feature 1..36: note = Synthetic oligonucleotide
  source 1..36: mol_type = other DNA
gcaccacgcacctgtggggattccctaatgtcttta

SEQ ID NO: 1468 - DNA, 35 bp, synthetic construct
  misc_feature 1..35: note = Synthetic oligonucleotide
  source 1..35: mol_type = other DNA
ctatcggactaatacacgtaaaaataactctggtt

SEQ ID NO: 1469 - DNA, 35 bp, synthetic construct
  misc_feature 1..35: note = Synthetic oligonucleotide
  source 1..35: mol_type = other DNA
ggcgtacttatcacaaacggtggaaccacacttct

SEQ ID NO: 1470 - DNA, 37 bp, synthetic construct
  misc_feature 1..37: note = Synthetic oligonucleotide
  source 1..37: mol_type = other DNA
tattcttatccaacccacgaaatcaattgtattttga

SEQ ID NO: 1471 - DNA, 35 bp, synthetic construct
  misc_feature 1..35: note = Synthetic oligonucleotide
  source 1..35: mol_type = other DNA
agatccgaatccgtaactccaaaatatttatgcac

SEQ ID NO: 1472 - DNA, 38 bp, synthetic construct
  misc_feature 1..38: note = Synthetic oligonucleotide
  source 1..38: mol_type = other DNA
actatagaacaatccaccgctttaaatcaactatctta

SEQ ID NO: 1473 - DNA, 35 bp, synthetic construct
  misc_feature 1..35: note = Synthetic oligonucleotide
  source 1..35: mol_type = other DNA
gccgttcttctgcgacgaacacatcctcccttaat

SEQ ID NO: 1474 - DNA, 35 bp, synthetic construct
  misc_feature 1..35: note = Synthetic oligonucleotide
  source 1..35: mol_type = other DNA
gcgcgaggcccgcgggctcatcacttttgttatct

SEQ ID NO: 1475 - DNA, 38 bp, synthetic construct
  misc_feature 1..38: note = Synthetic oligonucleotide
  source 1..38: mol_type = other DNA
tacccctgacaatcctcgcgccgaggcctccatcctga

SEQ ID NO: 1476 - DNA, 36 bp, synthetic construct
  misc_feature 1..36: note = Synthetic oligonucleotide
  source 1..36: mol_type = other DNA
ttcggtctaatttttagcggccaaattttcttatca

SEQ ID NO: 1477 - DNA, 36 bp, synthetic construct
  misc_feature 1..36: note = Synthetic oligonucleotide
  source 1..36: mol_type = other DNA
gattttaaaacccttgcacctgattgtgccaatcca

SEQ ID NO: 1478 - DNA, 35 bp, synthetic construct
  misc_feature 1..35: note = Synthetic oligonucleotide
  source 1..35: mol_type = other DNA
gcgcgaggcccgcgggctcatcacttttgttatat

SEQ ID NO: 1479 - DNA, 35 bp, synthetic construct
  misc_feature 1..35: note = Synthetic oligonucleotide
  source 1..35: mol_type = other DNA
gccgttcttctgcgacgaacacatcctcccttact

SEQ ID NO: 1480 - DNA, 36 bp, synthetic construct
  misc_feature 1..36: note = Synthetic oligonucleotide
  source 1..36: mol_type = other DNA
tgctcggccctattaacacgtgccgtgtcttgttca

SEQ ID NO: 1481 - DNA, 38 bp, synthetic construct
  misc_feature 1..38: note = Synthetic oligonucleotide
  source 1..38: mol_type = other DNA
tcgcgccgaccgtattacaccaactctatggactctaa

SEQ ID NO: 1482 - DNA, 36 bp, synthetic construct
  misc_feature 1..36: note = Synthetic oligonucleotide
  source 1..36: mol_type = other DNA
aacccaattcacatacactctcacccccactaaaca

SEQ ID NO: 1483 - DNA, 35 bp, synthetic construct
  misc_feature 1..35: note = Synthetic oligonucleotide
  source 1..35: mol_type = other DNA
gccgttcttctgcgacgaacacatcctcccttatt

SEQ ID NO: 1484 - DNA, 35 bp, synthetic construct
  misc_feature 1..35: note = Synthetic oligonucleotide
  source 1..35: mol_type = other DNA
gcgcgaggcccgcgggctcatcacttttgttatgt

SEQ ID NO: 1485 - DNA, 38 bp, synthetic construct
  misc_feature 1..38: note = Synthetic oligonucleotide
  source 1..38: mol_type = other DNA
tacccctgacaatcctcgcgccgaggcctccatcctca

SEQ ID NO: 1486 - DNA, 36 bp, synthetic construct
  misc_feature 1..36: note = Synthetic oligonucleotide
  source 1..36: mol_type = other DNA
ttccgcgcaaacgaatgactctttgttgaaaaacga

SEQ ID NO: 1487 - DNA, 36 bp, synthetic construct
  misc_feature 1..36: note = Synthetic oligonucleotide
  source 1..36: mol_type = other DNA
gcgtagtggctgcttggcgtttccgcatactaggca

SEQ ID NO: 1488 - DNA, 37 bp, synthetic construct
  misc_feature 1..37: note = Synthetic oligonucleotide
  source 1..37: mol_type = other DNA
aaacctcggctaaccgccaagggtagtgtcccccgca

SEQ ID NO: 1489 - DNA, 38 bp, synthetic construct
  misc_feature 1..38: note = Synthetic oligonucleotide
  source 1..38: mol_type = other DNA
atgagacgtagcaacactcgagacccttggagcactca

SEQ ID NO: 1490 - DNA, 36 bp, synthetic construct
  misc_feature 1..36: note = Synthetic oligonucleotide
  source 1..36: mol_type = other DNA
agctgccagggttcgggaccttaacggatgtcccaa

SEQ ID NO: 1491 - DNA, 37 bp, synthetic construct
  misc_feature 1..37: note = Synthetic oligonucleotide
  source 1..37: mol_type = other DNA
tcacgagcttccactacgtctatccgcgtagacggaa

SEQ ID NO: 1492 - DNA, 37 bp, synthetic construct
  misc_feature 1..37: note = Synthetic oligonucleotide
  source 1..37: mol_type = other DNA
gatcgacgattcgatcatccaacgtatttacaccaga

SEQ ID NO: 1493 - DNA, 36 bp, synthetic construct
  misc_feature 1..36: note = Synthetic oligonucleotide
  source 1..36: mol_type = other DNA
gcagccggcgaccgggatgtcgtcgggacttgctta

SEQ ID NO: 1494 - DNA, 38 bp, synthetic construct
  misc_feature 1..38: note = Synthetic oligonucleotide
  source 1..38: mol_type = other DNA
atgaaccatggttacacctctaatgtagcctcatgtca

SEQ ID NO: 1495 - DNA, 37 bp, synthetic construct
  misc_feature 1..37: note = Synthetic oligonucleotide
  source 1..37: mol_type = other DNA
ccaccggtacttattattcgccatccacacccagtta

SEQ ID NO: 1496 - DNA, 35 bp, synthetic construct
  misc_feature 1..35: note = Synthetic oligonucleotide
  source 1..35: mol_type = other DNA
tagttacgccactactctgtgggagaaacccgaga

SEQ ID NO: 1497 - DNA, 38 bp, synthetic construct
  misc_feature 1..38: note = Synthetic oligonucleotide
  source 1..38: mol_type = other DNA
atccacccaaaatcgatataagtgcgcccccaatctaa

SEQ ID NO: 1498 - DNA, 35 bp, synthetic construct
  misc_feature 1..35: note = Synthetic oligonucleotide
  source 1..35: mol_type = other DNA
aggggggaaagtcatcgggtggctgtactacttca

SEQ ID NO: 1499 - DNA, 37 bp, synthetic construct
  misc_feature 1..37: note = Synthetic oligonucleotide
  source 1..37: mol_type = other DNA
gggggtcgtactcccgagatttgcgttacggtgaaca

SEQ ID NO: 1500 - DNA, 37 bp, synthetic construct
  misc_feature 1..37: note = Synthetic oligonucleotide
  source 1..37: mol_type = other DNA
gagtatcctctggtcgttcggtacagaaacggtgtaa

SEQ ID NO: 1501 - DNA, 37 bp, synthetic construct
  misc_feature 1..37: note = Synthetic oligonucleotide
  source 1..37: mol_type = other DNA
acatggcctttaaatctacggagtactgttgggggga

SEQ ID NO: 1502 - DNA, 36 bp, synthetic construct
  misc_feature 1..36: note = Synthetic oligonucleotide
  source 1..36: mol_type = other DNA
gcgtagtggctgcttggcgtttccgcatactaggaa

SEQ ID NO: 1503 - DNA, 36 bp, synthetic construct
  misc_feature 1..36: note = Synthetic oligonucleotide
  source 1..36: mol_type = other DNA
tccgataccgaacttcactccgtgggcggggttgaa

SEQ ID NO: 1504 - DNA, 38 bp, synthetic construct
  misc_feature 1..38: note = Synthetic oligonucleotide
  source 1..38: mol_type = other DNA
gcagtgttatttctcttggtttctttgatttcacttaa

SEQ ID NO: 1505 - DNA, 38 bp, synthetic construct
  misc_feature 1..38: note = Synthetic oligonucleotide
  source 1..38: mol_type = other DNA
acatccagatacccttgacttaagattgtgaccactaa

SEQ ID NO: 1506 - DNA, 37 bp, synthetic construct
  misc_feature 1..37: note = Synthetic oligonucleotide
  source 1..37: mol_type = other DNA
acaggttctgcgaccagaaagttaggactaacctaga

SEQ ID NO: 1507 - DNA, 38 bp, synthetic construct
  misc_feature 1..38: note = Synthetic oligonucleotide
  source 1..38: mol_type = other DNA
gcagtgttatttctcttggtttctttgatttcacttca

SEQ ID NO: 1508 - DNA, 37 bp, synthetic construct
  misc_feature 1..37: note = Synthetic oligonucleotide
  source 1..37: mol_type = other DNA
ccgcagttttgttcccgggggaatccggactgaacga

SEQ ID NO: 1509 - DNA, 37 bp, synthetic construct
  misc_feature 1..37: note = Synthetic oligonucleotide
  source 1..37: mol_type = other DNA
aggtccggttcctatggactgcctgaccccgcgaaga

SEQ ID NO: 1510 - DNA, 35 bp, synthetic construct
  misc_feature 1..35: note = Synthetic oligonucleotide
  source 1..35: mol_type = other DNA
ttgtaacgatttgggagtccagagactcgctgttt

SEQ ID NO: 1511 - DNA, 37 bp, synthetic construct
  misc_feature 1..37: note = Synthetic oligonucleotide
  source 1..37: mol_type = other DNA
tttgatttaagtactcccgcgttcctccgaataccca

SEQ ID NO: 1512 - DNA, 38 bp, synthetic construct
  misc_feature 1..38: note = Synthetic oligonucleotide
  source 1..38: mol_type = other DNA
gcagagcgcacgtgtactcaatgggttgttaattttaa

SEQ ID NO: 1513 - DNA, 36 bp, synthetic construct
  misc_feature 1..36: note = Synthetic oligonucleotide
  source 1..36: mol_type = other DNA
gaactctgtattattcctgtcattagccgttggtaa

SEQ ID NO: 1514 - DNA, 38 bp, synthetic construct
  misc_feature 1..38: note = Synthetic oligonucleotide
  source 1..38: mol_type = other DNA
gaggccctaccgtgtattttgataatggatttgtttaa

SEQ ID NO: 1515 - DNA, 38 bp, synthetic construct
  misc_feature 1..38: note = Synthetic oligonucleotide
  source 1..38: mol_type = other DNA
tgtaatcacgggtgcgaactcgagagaatttgtgctaa

SEQ ID NO: 1516 - DNA, 38 bp, synthetic construct
  misc_feature 1..38: note = Synthetic oligonucleotide
  source 1..38: mol_type = other DNA
ggccggtagtccacgctttcgcgagatagtgactgtga

SEQ ID NO: 1517 - DNA, 36 bp, synthetic construct
  misc_feature 1..36: note = Synthetic oligonucleotide
  source 1..36: mol_type = other DNA
aggtcctcagaacttgtgcgtgagcaaagaatgaag

SEQ ID NO: 1518 - DNA, 38 bp, synthetic construct
  misc_feature 1..38: note = Synthetic oligonucleotide
  source 1..38: mol_type = other DNA
gagtatctgggttcgagagcgcatttgcccgctgttga

SEQ ID NO: 1519 - DNA, 35 bp, synthetic construct
  misc_feature 1..35: note = Synthetic oligonucleotide
  source 1..35: mol_type = other DNA
gtattaatcttcgctgtgggagagcgattacgcca

SEQ ID NO: 1520 - DNA, 36 bp, synthetic construct
  misc_feature 1..36: note = Synthetic oligonucleotide
  source 1..36: mol_type = other DNA
tatccttggatcaccgatcgatgcgagaggtagtaa

SEQ ID NO: 1521 - DNA, 38 bp, synthetic construct
  misc_feature 1..38: note = Synthetic oligonucleotide
  source 1..38: mol_type = other DNA
ttttctacgtgacggagagtccagatcgaagacaaaga

SEQ ID NO: 1522 - DNA, 36 bp, synthetic construct
  misc_feature 1..36: note = Synthetic oligonucleotide
  source 1..36: mol_type = other DNA
acaatgcatcgtagcgggtctcggagctcgccttaa

SEQ ID NO: 1523 - DNA, 37 bp, synthetic construct
  misc_feature 1..37: note = Synthetic oligonucleotide
  source 1..37: mol_type = other DNA
tacaaagaacggaagctattcaaaaacacacggagga

SEQ ID NO: 1524 - DNA, 35 bp, synthetic construct
  misc_feature 1..35: note = Synthetic oligonucleotide
  source 1..35: mol_type = other DNA
ggacgaccggatatagtaaagtccccggcttctgt

SEQ ID NO: 1525 - DNA, 37 bp, synthetic construct
  misc_feature 1..37: note = Synthetic oligonucleotide
  source 1..37: mol_type = other DNA
agccatcatgttggcacggtcctttgataccattgga

SEQ ID NO: 1526 - DNA, 36 bp, synthetic construct
  misc_feature 1..36: note = Synthetic oligonucleotide
  source 1..36: mol_type = other DNA
attaccgtcaacgggtcctgggctccatacgaggca

SEQ ID NO: 1527 - DNA, 35 bp, synthetic construct
  misc_feature 1..35: note = Synthetic oligonucleotide
  source 1..35: mol_type = other DNA
ctgctttaggtgtggtcgcactcaaatgtgaatgg

SEQ ID NO: 1528 - DNA, 36 bp, synthetic construct
  misc_feature 1..36: note = Synthetic oligonucleotide
  source 1..36: mol_type = other DNA
gcggggtaagaactcgatgaggtgagtggatttgta

SEQ ID NO: 1529 - DNA, 35 bp, synthetic construct
  misc_feature 1..35: note = Synthetic oligonucleotide
  source 1..35: mol_type = other DNA
aagggattggaacttggatgttttcagttggcgca

SEQ ID NO: 1530 - DNA, 38 bp, synthetic construct
  misc_feature 1..38: note = Synthetic oligonucleotide
  source 1..38: mol_type = other DNA
tgcctcggctagcatcacaatagatggtttgcacttga

SEQ ID NO: 1531 - DNA, 38 bp, synthetic construct
  misc_feature 1..38: note = Synthetic oligonucleotide
  source 1..38: mol_type = other DNA
gagacgaaggcaccttttcgacgcgataagctcgttga

SEQ ID NO: 1532 - DNA, 36 bp, synthetic construct
  misc_feature 1..36: note = Synthetic oligonucleotide
  source 1..36: mol_type = other DNA
accgcgaggtcttttggaacagggcatatgaatcca

SEQ ID NO: 1533 - DNA, 37 bp, synthetic construct
  misc_feature 1..37: note = Synthetic oligonucleotide
  source 1..37: mol_type = other DNA
acgtgaaactaccgagcggtgcttttcgctgtagcga

SEQ ID NO: 1534 - DNA, 37 bp, synthetic construct
  misc_feature 1..37: note = Synthetic oligonucleotide
  source 1..37: mol_type = other DNA
caacgcctgactactgtagagtgaacgctggtggtga

SEQ ID NO: 1535 - DNA, 38 bp, synthetic construct
  misc_feature 1..38: note = Synthetic oligonucleotide
  source 1..38: mol_type = other DNA
gcgaaggtttgggtaaaaggaaatagactttgttgtga

SEQ ID NO: 1536 - DNA, 36 bp, synthetic construct
  misc_feature 1..36: note = Synthetic oligonucleotide
  source 1..36: mol_type = other DNA
acaagtcgctgctcagcttcctagggcagtactcaa

SEQ ID NO: 1537 - DNA, 36 bp, synthetic construct
  misc_feature 1..36: note = Synthetic oligonucleotide
  source 1..36: mol_type = other DNA
aaacgggatctgtcgcgagtacagtgttgcccagta

SEQ ID NO: 1538 - DNA, 36 bp, synthetic construct
  misc_feature 1..36: note = Synthetic oligonucleotide
  source 1..36: mol_type = other DNA
taaaggaacagcgattcgggctgttattttaggtga

SEQ ID NO: 1539 - DNA, 36 bp, synthetic construct
  misc_feature 1..36: note = Synthetic oligonucleotide
  source 1..36: mol_type = other DNA
tgtgggattattgtagttgtagtaaggtgaccggca

SEQ ID NO: 1540 - DNA, 36 bp, synthetic construct
  misc_feature 1..36: note = Synthetic oligonucleotide
  source 1..36: mol_type = other DNA
cgctaaccggaactaggttgcaaagctatggtggta

SEQ ID NO: 1541 - DNA, 36 bp, synthetic construct
  misc_feature 1..36: note = Synthetic oligonucleotide
  source 1..36: mol_type = other DNA
cccttaggttccagtgaagttatgcaacttcatgta

SEQ ID NO: 1542 - DNA, 37 bp, synthetic construct
  misc_feature 1..37: note = Synthetic oligonucleotide
  source 1..37: mol_type = other DNA
ctattccagcttttttgatcccgcttttgagagttga

SEQ ID NO: 1543 - DNA, 38 bp, synthetic construct
  misc_feature 1..38: note = Synthetic oligonucleotide
  source 1..38: mol_type = other DNA
acaggacgtgcgcgctaacgttctattagttgtgctga

SEQ ID NO: 1544 - DNA, 36 bp, synthetic construct
  misc_feature 1..36: note = Synthetic oligonucleotide
  source 1..36: mol_type = other DNA
gagtttcgttttatgtgttggctttatttccctcga

SEQ ID NO: 1545 - DNA, 36 bp, synthetic construct
  misc_feature 1..36: note = Synthetic oligonucleotide
  source 1..36: mol_type = other DNA
tggcgttgtagccacgtccctccgctagtagagaaa

SEQ ID NO: 1546 - DNA, 35 bp, synthetic construct
  misc_feature 1..35: note = Synthetic oligonucleotide
  source 1..35: mol_type = other DNA
tcgtagtactggtcttaatttgttgtagtcctaag

SEQ ID NO: 1547 - DNA, 36 bp, synthetic construct
  misc_feature 1..36: note = Synthetic oligonucleotide
  source 1..36: mol_type = other DNA
tccacacgcggcgagctacgcgactaaaatcacgta

SEQ ID NO: 1548 - DNA, 38 bp, synthetic construct
  misc_feature 1..38: note = Synthetic oligonucleotide
  source 1..38: mol_type = other DNA
tatcaaattcggtcgtagtatttgtcgccgtaacgtga

SEQ ID NO: 1549 - DNA, 36 bp, synthetic construct
  misc_feature 1..36: note = Synthetic oligonucleotide
  source 1..36: mol_type = other DNA
gctacgaagtccaaacgtacgcacctgtttggagta

SEQ ID NO: 1550 - DNA, 35 bp, synthetic construct
  misc_feature 1..35: note = Synthetic oligonucleotide
  source 1..35: mol_type = other DNA
tccgggcaccatatctccactgtgcgaatcactat

SEQ ID NO: 1551 - DNA, 35 bp, synthetic construct
  misc_feature 1..35: note = Synthetic oligonucleotide
  source 1..35: mol_type = other DNA
tccgggcaccatatctccactgtgcgaatcactct

SEQ ID NO: 1552 - DNA, 38 bp, synthetic construct; identical to SEQ ID NO: 1543
  misc_feature 1..38: note = Synthetic oligonucleotide
  source 1..38: mol_type = other DNA

SEQ ID NO: 1553 - DNA, 36 bp, synthetic construct
  misc_feature 1..36: note = Synthetic oligonucleotide
  source 1..36: mol_type = other DNA
agcaaacgatgggccatcattcacgcttggtattaa

SEQ ID NO: 1554 - DNA, 38 bp, synthetic construct
  misc_feature 1..38: note = Synthetic oligonucleotide
  source 1..38: mol_type = other DNA
agggacgtgatatttcaatgctgaatatacacacctga

SEQ ID NO: 1555 - DNA, 37 bp, synthetic construct
  misc_feature 1..37: note = Synthetic oligonucleotide
  source 1..37: mol_type = other DNA
agtgattctcacttgttcccggggttcaaagatctga

SEQ ID NO: 1556 - DNA, 36 bp, synthetic construct
  misc_feature 1..36: note = Synthetic oligonucleotide
  source 1..36: mol_type = other DNA
atcaagggaggatttttcggtcggcctagggacaca

SEQ ID NO: 1557 - DNA, 35 bp, synthetic construct
  misc_feature 1..35: note = Synthetic oligonucleotide
  source 1..35: mol_type = other DNA
atacgcggcctaataataagatcgtcataccccaa

SEQ ID NO: 1558 - DNA, 35 bp, synthetic construct
  misc_feature 1..35: note = Synthetic oligonucleotide
  source 1..35: mol_type = other DNA
atctcacgataaagctaacggtgagagtatctact

SEQ ID NO: 1559 - DNA, 37 bp, synthetic construct
  misc_feature 1..37: note = Synthetic oligonucleotide
  source 1..37: mol_type = other DNA
ccgccggcgatgggggatcgcttattttattgttcga

SEQ ID NO: 1560 - DNA, 36 bp, synthetic construct
  misc_feature 1..36: note = Synthetic oligonucleotide
  source 1..36: mol_type = other DNA
cgggtacgttggatcgacaccgaccatcttgacgta

SEQ ID NO: 1561 - DNA, 36 bp, synthetic construct; identical to SEQ ID NO: 1540
  misc_feature 1..36: note = Synthetic oligonucleotide
  source 1..36: mol_type = other DNA

SEQ ID NO: 1562 - DNA, 38 bp, synthetic construct
  misc_feature 1..38: note = Synthetic oligonucleotide
  source 1..38: mol_type = other DNA
cgagtgctgcgcgggttccttggggtgctccaatttga

SEQ ID NO: 1563 - DNA, 35 bp, synthetic construct
  misc_feature 1..35: note = Synthetic oligonucleotide
  source 1..35: mol_type = other DNA
cgtgtaacccgcccaattccatcgtcacgaaattt

SEQ ID NO: 1564 - DNA, 37 bp, synthetic construct; identical to SEQ ID NO: 1542
  misc_feature 1..37: note = Synthetic oligonucleotide
  source 1..37: mol_type = other DNA

SEQ ID NO: 1565 - DNA, 38 bp, synthetic construct
  misc_feature 1..38: note = Synthetic oligonucleotide
  source 1..38: mol_type = other DNA
cctcgaacctgcgcgggagaaggcgcttgctaatctga

SEQ ID NO: 1566 - DNA, 38 bp, synthetic construct
  misc_feature 1..38: note = Synthetic oligonucleotide
  source 1..38: mol_type = other DNA
cttggtccctgctcggttgaatgacgcaatgagtgtga

SEQ ID NO: 1567 - DNA, 38 bp, synthetic construct
  misc_feature 1..38: note = Synthetic oligonucleotide
  source 1..38: mol_type = other DNA
ctcgtaggactgaggtcgatagttatttcacaccgtga

SEQ ID NO: 1568 - DNA, 38 bp, synthetic construct
  misc_feature 1..38: note = Synthetic oligonucleotide
  source 1..38: mol_type = other DNA
gacacgacgtatctccttattccctgctataagtttga

SEQ ID NO: 1569 - DNA, 36 bp, synthetic construct
  misc_feature 1..36: note = Synthetic oligonucleotide
  source 1..36: mol_type = other DNA
gacgttcttgcaccgcgaggtctgcagcaattctaa

SEQ ID NO: 1570 - DNA, 35 bp, synthetic construct
  misc_feature 1..35: note = Synthetic oligonucleotide
  source 1..35: mol_type = other DNA
gcaactattgggccgtattcgtccacggggcttgt

SEQ ID NO: 1571 - DNA, 38 bp, synthetic construct
  misc_feature 1..38: note = Synthetic oligonucleotide
  source 1..38: mol_type = other DNA
gcgtagggttggttatgcatcaattttccgctaattga

SEQ ID NO: 1572 - DNA, 36 bp, synthetic construct
  misc_feature 1..36: note = Synthetic oligonucleotide
  source 1..36: mol_type = other DNA
gccttcggggtttattaagttattacggatctagta

SEQ ID NO: 1573 - DNA, 37 bp, synthetic construct
  misc_feature 1..37: note = Synthetic oligonucleotide
  source 1..37: mol_type = other DNA
gcgcgtgagctgcaccgacatcacgccgattctctga

SEQ ID NO: 1574 - DNA, 36 bp, synthetic construct; identical to SEQ ID NO: 1549
  misc_feature 1..36: note = Synthetic oligonucleotide
  source 1..36: mol_type = other DNA

SEQ ID NO: 1575 - DNA, 36 bp, synthetic construct
  misc_feature 1..36: note = Synthetic oligonucleotide
  source 1..36: mol_type = other DNA
ggtcactcgtaggtctcccgcatcgagaaagccgta

SEQ ID NO: 1576 - DNA, 38 bp, synthetic construct
  misc_feature 1..38: note = Synthetic oligonucleotide
  source 1..38: mol_type = other DNA
gtggatggcactaatatccccttctcgttaaagtgtga

SEQ ID NO: 1577 - DNA, 35 bp, synthetic construct
  misc_feature 1..35: note = Synthetic oligonucleotide
  source 1..35: mol_type = other DNA
gtccaccgggattcgtatgggtatttttacccacc

SEQ ID NO: 1578 - DNA, 38 bp, synthetic construct
  misc_feature 1..38: note = Synthetic oligonucleotide
  source 1..38: mol_type = other DNA
gttacggtatgcgaggtctcacgttgcgatcattttga

SEQ ID NO: 1579 - DNA, 37 bp, synthetic construct
  misc_feature 1..37: note = Synthetic oligonucleotide
  source 1..37: mol_type = other DNA
gttcatcgttcctatgtcactatttccctactgctga

SEQ ID NO: 1580 - DNA, 37 bp, synthetic construct
  misc_feature 1..37: note = Synthetic oligonucleotide
  source 1..37: mol_type = other DNA
tactaggggccgtgagccttgtgccccaagtagccga

SEQ ID NO: 1581 - DNA, 38 bp, synthetic construct; identical to SEQ ID NO: 1548
  misc_feature 1..38: note = Synthetic oligonucleotide
  source 1..38: mol_type = other DNA

SEQ ID NO: 1582 - DNA, 36 bp, synthetic construct; identical to SEQ ID NO: 1547
  misc_feature 1..36: note = Synthetic oligonucleotide
  source 1..36: mol_type = other DNA

SEQ ID NO: 1583 - DNA, 35 bp, synthetic construct; identical to SEQ ID NO: 1546
  misc_feature 1..35: note = Synthetic oligonucleotide
  source 1..35: mol_type = other DNA

SEQ ID NO: 1584 - DNA, 37 bp, synthetic construct
  misc_feature 1..37: note = Synthetic oligonucleotide
  source 1..37: mol_type = other DNA
tcgtgcgctcggttctacgccactgtacgagacacga

SEQ ID NO: 1585 - DNA, 35 bp, synthetic construct
  misc_feature 1..35: note = Synthetic oligonucleotide
  source 1..35: mol_type = other DNA
tgtacgaaccgggcctaggatagttgctacatgta

SEQ ID NO: 1586 - DNA, 36 bp, synthetic construct
  misc_feature 1..36: note = Synthetic oligonucleotide
  source 1..36: mol_type = other DNA
ataatgccagatctttggtttatcttgcgcttggta

SEQ ID NO: 1587 - DNA, 37 bp, synthetic construct
  misc_feature 1..37: note = Synthetic oligonucleotide
  source 1..37: mol_type = other DNA
ccattagctgagtttcggtggacgcatgatagtttga

SEQ ID NO: 1588 - DNA, 35 bp, synthetic construct
  misc_feature 1..35: note = Synthetic oligonucleotide
  source 1..35: mol_type = other DNA
actccatgggccccccggtttggaccccgggttta

SEQ ID NO: 1589 - DNA, 36 bp, synthetic construct
  misc_feature 1..36: note = Synthetic oligonucleotide
  source 1..36: mol_type = other DNA
gaaaatctggcgacttagttttcgtttgatccctta

SEQ ID NO: 1590 - DNA, 36 bp, synthetic construct
  misc_feature 1..36: note = Synthetic oligonucleotide
  source 1..36: mol_type = other DNA
agctcatggacgcactggtggcagtgcgactactaa

SEQ ID NO: 1591 - DNA, 35 bp, synthetic construct
  misc_feature 1..35: note = Synthetic oligonucleotide
  source 1..35: mol_type = other DNA
aggataactggtttttatctctgctaattcactcg

SEQ ID NO: 1592 - DNA, 38 bp, synthetic construct
  misc_feature 1..38: note = Synthetic oligonucleotide
  source 1..38: mol_type = other DNA
cgtggcctgtttggagacgtactgtgtcaggcatttga

SEQ ID NO: 1593 - DNA, 36 bp, synthetic construct
  misc_feature 1..36: note = Synthetic oligonucleotide
  source 1..36: mol_type = other DNA
accttgggatcctgtttagaccgaatcggtgcgcta

SEQ ID NO: 1594 - DNA, 35 bp, synthetic construct
  misc_feature 1..35: note = Synthetic oligonucleotide
  source 1..35: mol_type = other DNA
atcgtagtcatagacccggctttggtttccgggta

SEQ ID NO: 1595 - DNA, 37 bp, synthetic construct
  misc_feature 1..37: note = Synthetic oligonucleotide
  source 1..37: mol_type = other DNA
gacctgggctgtctttactttgtttcgcggggctgga

SEQ ID NO: 1596 - DNA, 38 bp, synthetic construct
  misc_feature 1..38: note = Synthetic oligonucleotide
  source 1..38: mol_type = other DNA
ccttgagccgccgggtttcggtccttattcgtgaatga

SEQ ID NO: 1597 - DNA, 35 bp, synthetic construct
  misc_feature 1..35: note = Synthetic oligonucleotide
  source 1..35: mol_type = other DNA
agatcttttcggttattggggggaaccgagacgta

SEQ ID NO: 1598 - DNA, 36 bp, synthetic construct
  misc_feature 1..36: note = Synthetic oligonucleotide
  source 1..36: mol_type = other DNA
gtgcgttggttaccgatggaggggacccgtagacta

SEQ ID NO: 1599 - DNA, 35 bp, synthetic construct
  misc_feature 1..35: note = Synthetic oligonucleotide
  source 1..35: mol_type = other DNA
ttttattggctcgtttcctataatatgttgaatcc

SEQ ID NO: 1600 - DNA, 35 bp, synthetic construct
  misc_feature 1..35: note = Synthetic oligonucleotide
  source 1..35: mol_type = other DNA
gcctcgacgacagtgacctacatcgctcgtttcgt

SEQ ID NO: 1601 - DNA, 38 bp, synthetic construct
  misc_feature 1..38: note = Synthetic oligonucleotide
  source 1..38: mol_type = other DNA
ggtctggggggattcctacggttccaacagcataatga

SEQ ID NO: 1602 - DNA, 36 bp, synthetic construct
  misc_feature 1..36: note = Synthetic oligonucleotide
  source 1..36: mol_type = other DNA
gttgccttgtaccccatagctggtaaggtcctagta

SEQ ID NO: 1603 - DNA, 36 bp, synthetic construct
  misc_feature 1..36: note = Synthetic oligonucleotide
  source 1..36: mol_type = other DNA
gttgttcgggcgtcgcaacacggtcccattgtctta

SEQ ID NO: 1604 - DNA, 36 bp, synthetic construct
  misc_feature 1..36: note = Synthetic oligonucleotide
  source 1..36: mol_type = other DNA
tcgttatagcctatatacacgcggttgactcgctga

SEQ ID NO: 1605 - DNA, 35 bp, synthetic construct
  misc_feature 1..35: note = Synthetic oligonucleotide
  source 1..35: mol_type = other DNA
ttgtagctgctattgttttctcgattgagaactta

SEQ ID NO: 1606 - DNA, 35 bp, synthetic construct
  misc_feature 1..35: note = Synthetic oligonucleotide
  source 1..35: mol_type = other DNA
ggctcttggtttagcccttattgtttatcattcat

SEQ ID NO: 1607 - DNA, 35 bp, synthetic construct
  misc_feature 1..35: note = Synthetic oligonucleotide
  source 1..35: mol_type = other DNA
taattggcccgtttccaaatttatagattcctaca

SEQ ID NO: 1608 - DNA, 38 bp, synthetic construct
  misc_feature 1..38: note = Synthetic oligonucleotide
  source 1..38: mol_type = other DNA
tccgacccatatcgacgatactggcgtggcgctactga

SEQ ID NO: 1609 - DNA, 38 bp, synthetic construct
  misc_feature 1..38: note = Synthetic oligonucleotide
  source 1..38: mol_type = other DNA
tgcgtgagtaacgcacaggggaacactccgttttgtga

SEQ ID NO: 1610 - DNA, 36 bp, synthetic construct
  misc_feature 1..36: note = Synthetic oligonucleotide
  source 1..36: mol_type = other DNA
gctggtatagctgggtttctatcgtttattctcgta

SEQ ID NO: 1611 - DNA, 36 bp, synthetic construct
  misc_feature 1..36: note = Synthetic oligonucleotide
  source 1..36: mol_type = other DNA
tttgcttcatttgcacttcccccgttattccgctca

SEQ ID NO: 1612 - DNA, 38 bp, synthetic construct
  misc_feature 1..38: note = Synthetic oligonucleotide
  source 1..38: mol_type = other DNA
aatttttactgcgtggaaaggattcgggaatttgttga

SEQ ID NO: 1613 - DNA, 36 bp, synthetic construct; identical to SEQ ID NO: 1593
  misc_feature 1..36: note = Synthetic oligonucleotide
  source 1..36: mol_type = other DNA

SEQ ID NO: 1614 - DNA, 35 bp, synthetic construct; identical to SEQ ID NO: 1591
  misc_feature 1..35: note = Synthetic oligonucleotide
  source 1..35: mol_type = other DNA

SEQ ID NO: 1615 - DNA, 36 bp, synthetic construct; identical to SEQ ID NO: 1590
  misc_feature 1..36: note = Synthetic oligonucleotide
  source 1..36: mol_type = other DNA

SEQ ID NO: 1616 - DNA, 36 bp, synthetic construct
  misc_feature 1..36: note = Synthetic oligonucleotide
  source 1..36: mol_type = other DNA
aggagtacgcgttcatccagacacggaatactttga

SEQ ID NO: 1617 - DNA, 36 bp, synthetic construct
  misc_feature 1..36: note = Synthetic oligonucleotide
  source 1..36: mol_type = other DNA
agccttacgccatgccgagagagcgctttgtttcga

SEQ ID NO: 1618 - DNA, 35 bp, synthetic construct
  misc_feature 1..35: note = Synthetic oligonucleotide
  source 1..35: mol_type = other DNA
agggcttagtttcctgattttactacagctcgctc

SEQ ID NO: 1619 - DNA, 36 bp, synthetic construct; identical to SEQ ID NO: 1586
  misc_feature 1..36: note = Synthetic oligonucleotide
  source 1..36: mol_type = other DNA

SEQ ID NO: 1620 - DNA, 35 bp, synthetic construct
  misc_feature 1..35: note = Synthetic oligonucleotide
  source 1..35: mol_type = other DNA
agtcctgatgctcaatgcgcgagtttcattgagct

SEQ ID NO: 1621 - DNA, 35 bp, synthetic construct; identical to SEQ ID NO: 1594
  misc_feature 1..35: note = Synthetic oligonucleotide
  source 1..35: mol_type = other DNA

SEQ ID NO: 1622 - DNA, 37 bp, synthetic construct; identical to SEQ ID NO: 1587
  misc_feature 1..37: note = Synthetic oligonucleotide
  source 1..37: mol_type = other DNA

SEQ ID NO: 1623 - DNA, 35 bp, synthetic construct
  misc_feature 1..35: note = Synthetic oligonucleotide
  source 1..35: mol_type = other DNA
cgtaagccggtttcagcccacctggagattcttca

SEQ ID NO: 1624 - DNA, 38 bp, synthetic construct; identical to SEQ ID NO: 1596
  misc_feature 1..38: note = Synthetic oligonucleotide
  source 1..38: mol_type = other DNA

SEQ ID NO: 1625 - DNA, 36 bp, synthetic construct
  misc_feature 1..36: note = Synthetic oligonucleotide
  source 1..36: mol_type = other DNA
cgtagttactcgtcatggggtctttgttatgtggta

SEQ ID NO: 1626 - DNA, 36 bp, synthetic construct; identical to SEQ ID NO: 1589
  misc_feature 1..36: note = Synthetic oligonucleotide
  source 1..36: mol_type = other DNA

SEQ ID NO: 1627 - DNA, 37 bp, synthetic construct; identical to SEQ ID NO: 1595
  misc_feature 1..37: note = Synthetic oligonucleotide
  source 1..37: mol_type = other DNA

SEQ ID NO: 1628 - DNA, 37 bp, synthetic construct
  misc_feature 1..37: note = Synthetic oligonucleotide
  source 1..37: mol_type = other DNA
gagtccccttctttgatgctggggtgagctcctccga

SEQ ID NO: 1629 - DNA, 37 bp, synthetic construct
  misc_feature 1..37: note = Synthetic oligonucleotide
  source 1..37: mol_type = other DNA
gatgatcgcgcctttcgtttgtgacggttaccaggga

SEQ ID NO: 1630 - DNA, 35 bp, synthetic construct; identical to SEQ ID NO: 1600
  misc_feature 1..35: note = Synthetic oligonucleotide
  source 1..35: mol_type = other DNA

SEQ ID NO: 1631 - DNA, 38 bp, synthetic construct
  misc_feature 1..38: note = Synthetic oligonucleotide
  source 1..38: mol_type = other DNA
ggcccccgctccctagtttgagcgccctccacgattga

SEQ ID NO: 1632 - DNA, 35 bp, synthetic construct; identical to SEQ ID NO: 1606
  misc_feature 1..35: note = Synthetic oligonucleotide
  source 1..35: mol_type = other DNA

SEQ ID NO: 1633 - DNA, 38 bp, synthetic construct; identical to SEQ ID NO: 1601
  misc_feature 1..38: note = Synthetic oligonucleotide
  source 1..38: mol_type = other DNA

SEQ ID NO: 1634 - DNA, 36 bp, synthetic construct; identical to SEQ ID NO: 1602
  misc_feature 1..36: note = Synthetic oligonucleotide
  source 1..36: mol_type = other DNA

SEQ ID NO: 1635 - DNA, 36 bp, synthetic construct; identical to SEQ ID NO: 1603
  misc_feature 1..36: note = Synthetic oligonucleotide
  source 1..36: mol_type = other DNA

SEQ ID NO: 1636 - DNA, 38 bp, synthetic construct
  misc_feature 1..38: note = Synthetic oligonucleotide
  source 1..38: mol_type = other DNA
tactggggaagctccgggcgcttggtttcgccacctga

SEQ ID NO: 1637 - DNA, 35 bp, synthetic construct
  misc_feature 1..35: note = Synthetic oligonucleotide
  source 1..35: mol_type = other DNA
tcatttcggactgttctaacgcgagttatgaaggg

SEQ ID NO: 1638 - DNA, 36 bp, synthetic construct
  misc_feature 1..36: note = Synthetic oligonucleotide
  source 1..36: mol_type = other DNA
tcacccgacggcaacaagggcatttgcttcatagta

SEQ ID NO: 1639 - DNA, 37 bp, synthetic construct
  misc_feature 1..37: note = Synthetic oligonucleotide
  source 1..37: mol_type = other DNA
tcgaggggaattgtccacatgcatggtttcataagga

SEQ ID NO: 1640 - DNA, 38 bp, synthetic construct; identical to SEQ ID NO: 1608
  misc_feature 1..38: note = Synthetic oligonucleotide
  source 1..38: mol_type = other DNA

SEQ ID NO: 1641 - DNA, 38 bp, synthetic construct; identical to SEQ ID NO: 1609
  misc_feature 1..38: note = Synthetic oligonucleotide
  source 1..38: mol_type = other DNA

SEQ ID NO: 1642 - DNA, 38 bp, synthetic construct
  misc_feature 1..38: note = Synthetic oligonucleotide
  source 1..38: mol_type = other DNA
tgttcttactaggcttagcagcctgttcccgttattga

SEQ ID NO: 1643 - DNA, 37 bp, synthetic construct
  misc_feature 1..37: note = Synthetic oligonucleotide
  source 1..37: mol_type = other DNA
tgttttcagaccagagtaggaattccgagggcggtta

SEQ ID NO: 1644 - DNA, 35 bp, synthetic construct
  misc_feature 1..35: note = Synthetic oligonucleotide
  source 1..35: mol_type = other DNA
tgttttgctgcttagagcgtaatcgtattggctct

SEQ ID NO: 1645 - DNA, 37 bp, synthetic construct
  misc_feature 1..37: note = Synthetic oligonucleotide
  source 1..37: mol_type = other DNA
ttcctaggatgaaacagaaacaccgattggtccagga

SEQ ID NO: 1646 - DNA, 37 bp, synthetic construct
  misc_feature 1..37: note = Synthetic oligonucleotide
  source 1..37: mol_type = other DNA
ttccggttttgggcgactccgtttgcgcccacgctga

SEQ ID NO: 1647 - DNA, 35 bp, synthetic construct
  misc_feature 1..35: note = Synthetic oligonucleotide
  source 1..35: mol_type = other DNA
tttgcaagttcgctacgtatatccactgtgaagcc

SEQ ID NO: 1648 - DNA, 35 bp, synthetic construct; identical to SEQ ID NO: 1605
  misc_feature 1..35: note = Synthetic oligonucleotide
  source 1..35: mol_type = other DNA

SEQ ID NO: 1649 - DNA, 37 bp, synthetic construct
  misc_feature 1..37: note = Synthetic oligonucleotide
  source 1..37: mol_type = other DNA
ttttgttaaacaacgccggcaagggtcgttgttacga

SEQ ID NO: 1650 - DNA, 37 bp, synthetic construct
  misc_feature 1..37: note = Synthetic oligonucleotide
  source 1..37: mol_type = other DNA
ttttcgcattaaaaacgggtgtccaccggttggtgga

SEQ ID NO: 1651 - DNA, 36 bp, synthetic construct
  misc_feature 1..36: note = Synthetic oligonucleotide
  source 1..36: mol_type = other DNA
cgcgcgagcaactacactaacggaaaacccgttcaa

SEQ ID NO: 1652 - DNA, 36 bp, synthetic construct
  misc_feature 1..36: note = Synthetic oligonucleotide
  source 1..36: mol_type = other DNA
ctactcgccgcaacccaacactcagtcaaacgatca

SEQ ID NO: 1653 - DNA, 38 bp, synthetic construct
  misc_feature 1..38: note = Synthetic oligonucleotide
  source 1..38: mol_type = other DNA
ataacgcacgtttccataactcataccactggccttga

SEQ ID NO: 1654 - DNA, 35 bp, synthetic construct
  misc_feature 1..35: note = Synthetic oligonucleotide
  source 1..35: mol_type = other DNA
gagagaagtatttgttaagccacatagttttcttg

SEQ ID NO: 1655 - DNA, 36 bp, synthetic construct
  misc_feature 1..36: note = Synthetic oligonucleotide
  source 1..36: mol_type = other DNA
ccttactgcatggtttggtaccgctattgtccccca

SEQ ID NO: 1656 - DNA, 37 bp, synthetic construct
  misc_feature 1..37: note = Synthetic oligonucleotide
  source 1..37: mol_type = other DNA
aaaattatgcgccttagggaagacatacggcctgtga

SEQ ID NO: 1657 - DNA, 37 bp, synthetic construct
  misc_feature 1..37: note = Synthetic oligonucleotide
  source 1..37: mol_type = other DNA
aatgatcggacttgcaggctcaaccctactgatggga

SEQ ID NO: 1658 - DNA, 35 bp, synthetic construct
  misc_feature 1..35: note = Synthetic oligonucleotide
  source 1..35: mol_type = other DNA
aaggcacgtacacactatcacctggggtgtgcctc

SEQ ID NO: 1659 - DNA, 35 bp, synthetic construct
  misc_feature 1..35: note = Synthetic oligonucleotide
  source 1..35: mol_type = other DNA
aatagattaaagtgaacgtgagtgtttccatatta

SEQ ID NO: 1660 - DNA, 38 bp, synthetic construct
  misc_feature 1..38: note = Synthetic oligonucleotide
  source 1..38: mol_type = other DNA
aattcgtcactcgttgtgtgtagccggtgcccaattga

SEQ ID NO: 1661 - DNA, 36 bp, synthetic construct
  misc_feature 1..36: note = Synthetic oligonucleotide
  source 1..36: mol_type = other DNA
acgggagatcctttaagtacgtcgaagccagcaata

SEQ ID NO: 1662 - DNA, 37 bp, synthetic construct
  misc_feature 1..37: note = Synthetic oligonucleotide
  source 1..37: mol_type = other DNA
actccgttacgtgttggcgctttcagttcagcacgga

SEQ ID NO: 1663 - DNA, 35 bp, synthetic construct
  misc_feature 1..35: note = Synthetic oligonucleotide
  source 1..35: mol_type = other DNA
agacagtggacttctcgtcgaaaatgcatctctat

SEQ ID NO: 1664 - DNA, 37 bp, synthetic construct
  misc_feature 1..37: note = Synthetic oligonucleotide
  source 1..37: mol_type = other DNA
agagaacgttgcccttgagtgtttcttgagccttgga

SEQ ID NO: 1665 - DNA, 36 bp, synthetic construct
  misc_feature 1..36: note = Synthetic oligonucleotide
  source 1..36: mol_type = other DNA
agcgtgtatcatcactgatttagttatcccgagcta

SEQ ID NO: 1666 - DNA, 36 bp, synthetic construct
  misc_feature 1..36: note = Synthetic oligonucleotide
  source 1..36: mol_type = other DNA
agaggccagcttagtgtggccaccgtgagtttacta

SEQ ID NO: 1667 - DNA, 35 bp, synthetic construct
  misc_feature 1..35: note = Synthetic oligonucleotide
  source 1..35: mol_type = other DNA
atatgtatacgaaccctcctaatcgcactatcagt

SEQ ID NO: 1668 - DNA, 38 bp, synthetic construct; identical to SEQ ID NO: 1653
  misc_feature 1..38: note = Synthetic oligonucleotide
  source 1..38: mol_type = other DNA

SEQ ID NO: 1669 - DNA, 36 bp, synthetic construct
  misc_feature 1..36: note = Synthetic oligonucleotide
  source 1..36: mol_type = other DNA
agtacctatcaaggattttgccgaatccgtgccgca

SEQ ID NO: 1670 - DNA, 35 bp, synthetic construct
  misc_feature 1..35: note = Synthetic oligonucleotide
  source 1..35: mol_type = other DNA
agttcactctaacttccgtgccgaaggcgttatcc

SEQ ID NO: 1671 - DNA, 35 bp, synthetic construct
  misc_feature 1..35: note = Synthetic oligonucleotide
  source 1..35: mol_type = other DNA
cacatcgactgcgcgatcaatattagggtggacat

SEQ ID NO: 1672 - DNA, 35 bp, synthetic construct
  misc_feature 1..35: note = Synthetic oligonucleotide
  source 1..35: mol_type = other DNA
attgcattcttcaggacgcttcgcccgggattctt

SEQ ID NO: 1673 - DNA, 35 bp, synthetic construct
  misc_feature 1..35: note = Synthetic oligonucleotide
  source 1..35: mol_type = other DNA
catccctgacgcgagttggaacatgagtacgtact

SEQ ID NO: 1674 - DNA, 36 bp, synthetic construct
  misc_feature 1..36: note = Synthetic oligonucleotide
  source 1..36: mol_type = other DNA
caccgcttagtcttatttagggtcgctaatctggta

SEQ ID NO: 1675 - DNA, 36 bp, synthetic construct
  misc_feature 1..36: note = Synthetic oligonucleotide
  source 1..36: mol_type = other DNA
caaaccgctgcaaaaggatccccgttatggctacat

SEQ ID NO: 1676 - DNA, 38 bp, synthetic construct
  misc_feature 1..38: note = Synthetic oligonucleotide
  source 1..38: mol_type = other DNA
ccggaccattaggtcttcttgttcaaatactttgatga

SEQ ID NO: 1677 - DNA, 36 bp, synthetic construct
  misc_feature 1..36: note = Synthetic oligonucleotide
  source 1..36: mol_type = other DNA
ccgagcttcgtttgggttcatttcgtccgattcgca

SEQ ID NO: 1678 - DNA, 38 bp, synthetic construct
  misc_feature 1..38: note = Synthetic oligonucleotide
  source 1..38: mol_type = other DNA
cctcctattacagttccccgggaatgaatagcaactga

SEQ ID NO: 1679 - DNA, 38 bp, synthetic construct
  misc_feature 1..38: note = Synthetic oligonucleotide
  source 1..38: mol_type = other DNA
cgcctataccgcactcgcttggaacgacacaaagctga

SEQ ID NO: 1680 - DNA, 38 bp, synthetic construct
  misc_feature 1..38: note = Synthetic oligonucleotide
  source 1..38: mol_type = other DNA
cgtggattcgcccacatgatgatggccggtatgtttga

SEQ ID NO: 1681 - DNA, 37 bp, synthetic construct
  misc_feature 1..37: note = Synthetic oligonucleotide
  source 1..37: mol_type = other DNA
ccttttgtaggacgccctttctgcgcatccggtagga

SEQ ID NO: 1682 - DNA, 37 bp, synthetic construct
  misc_feature 1..37: note = Synthetic oligonucleotide
  source 1..37: mol_type = other DNA
ccttaactacacgagagcatgtcaaggggtaaatgga

SEQ ID NO: 1683 - DNA, 36 bp, synthetic construct; identical to SEQ ID NO: 1652
  misc_feature 1..36: note = Synthetic oligonucleotide
  source 1..36: mol_type = other DNA

SEQ ID NO: 1684 - DNA, 38 bp, synthetic construct; identical to SEQ ID NO: 1562
  misc_feature 1..38: note = Synthetic oligonucleotide
  source 1..38: mol_type = other DNA

SEQ ID NO: 1685 - DNA, 36 bp, synthetic construct
  misc_feature 1..36: note = Synthetic oligonucleotide
  source 1..36: mol_type = other DNA
cggagtacgaagccgcttagattacctagcccgtta

SEQ ID NO: 1686 - DNA, 37 bp, synthetic construct
  misc_feature 1..37: note = Synthetic oligonucleotide
  source 1..37: mol_type = other DNA
cgagcgacgtttgtttcaaaaatcactgggaatatga

SEQ ID NO: 1687 - DNA, 35 bp, synthetic construct
  misc_feature 1..35: note = Synthetic oligonucleotide
  source 1..35: mol_type = other DNA
ctacatcgctctccgtaatcgggcgattcatttca

SEQ ID NO: 1688 - DNA, 38 bp, synthetic construct
  misc_feature 1..38: note = Synthetic oligonucleotide
  source 1..38: mol_type = other DNA
gaaaacgttggaagtttttacgccgctctcagccgtga

SEQ ID NO: 1689 - DNA, 35 bp, synthetic construct
  misc_feature 1..35: note = Synthetic oligonucleotide
  source 1..35: mol_type = other DNA
gaatttatgcaatccattaggaaaatgggtgtgcg

SEQ ID NO: 1690 - DNA, 36 bp, synthetic construct
  misc_feature 1..36: note = Synthetic oligonucleotide
  source 1..36: mol_type = other DNA
ctgacagtcttccctggtctattgtccgcagatcga

SEQ ID NO: 1691 - DNA, 38 bp, synthetic construct; identical to SEQ ID NO: 1566
  misc_feature 1..38: note = Synthetic oligonucleotide
  source 1..38: mol_type = other DNA

SEQ ID NO: 1692 - DNA, 36 bp, synthetic construct
  misc_feature 1..36: note = Synthetic oligonucleotide
  source 1..36: mol_type = other DNA
gagggactgcacagcggtgatattctaaatgtacga

SEQ ID NO: 1693 - DNA, 38 bp, synthetic construct
  misc_feature 1..38: note = Synthetic oligonucleotide
  source 1..38: mol_type = other DNA
gaccgggtaggcttctaggcgcccccctccttacttga

SEQ ID NO: 1694 - DNA, 35 bp, synthetic construct
  misc_feature 1..35: note = Synthetic oligonucleotide
  source 1..35: mol_type = other DNA
gaccaaagtatgtgtggtattgatatgccgtgaac

SEQ ID NO: 1695 - DNA, 36 bp, synthetic construct
  misc_feature 1..36: note = Synthetic oligonucleotide
  source 1..36: mol_type = other DNA
gagaaccgtgctcaaggcagaattgtcaccgctcga

SEQ ID NO: 1696 - DNA, 38 bp, synthetic construct
  misc_feature 1..38: note = Synthetic oligonucleotide
  source 1..38: mol_type = other DNA
gacgagtgacttgcactacgaaggccctcgtcgcctga

SEQ ID NO: 1697 - DNA, 37 bp, synthetic construct
  misc_feature 1..37: note = Synthetic oligonucleotide
  source 1..37: mol_type = other DNA
gagtttgtcttgccccgggtcgggacgttgtatccta

SEQ ID NO: 1698 - DNA, 35 bp, synthetic construct
  misc_feature 1..35: note = Synthetic oligonucleotide
  source 1..35: mol_type = other DNA
gagtggcttactttcattggatccgtgagccttgc

SEQ ID NO: 1699 - DNA, 37 bp, synthetic construct
  misc_feature 1..37: note = Synthetic oligonucleotide
  source 1..37: mol_type = other DNA
gcaatacgctagataggcttagaaacggaatacacga

SEQ ID NO: 1700 - DNA, 35 bp, synthetic construct
  misc_feature 1..35: note = Synthetic oligonucleotide
  source 1..35: mol_type = other DNA
gatgtcgtcacggaagtacatatggcgctgtagcc

SEQ ID NO: 1701 - DNA, 35 bp, synthetic construct
  misc_feature 1..35: note = Synthetic oligonucleotide
  source 1..35: mol_type = other DNA
gccactggatttaactgcatcccgtctctgaggct

SEQ ID NO: 1702 - DNA, 35 bp, synthetic construct; identical to SEQ ID NO: 1570
  misc_feature 1..35: note = Synthetic oligonucleotide
  source 1..35: mol_type = other DNA

SEQ ID NO: 1703 - DNA, 37 bp, synthetic construct
  misc_feature 1..37: note = Synthetic oligonucleotide
  source 1..37: mol_type = other DNA
gcaatatgggatatgtgtaactcagtgagacaggaga

SEQ ID NO: 1704 - DNA, 37 bp, synthetic construct
  misc_feature 1..37: note = Synthetic oligonucleotide
  source 1..37: mol_type = other DNA
gattacataactcgtacgtcgcttgttttaagtttga

SEQ ID NO: 1705 - DNA, 37 bp, synthetic construct
  misc_feature 1..37: note = Synthetic oligonucleotide
  source 1..37: mol_type = other DNA
gcgtgctgctttgtactacggtctcatcgttgtagga

SEQ ID NO: 1706 - DNA, 35 bp, synthetic construct
  misc_feature 1..35: note = Synthetic oligonucleotide
  source 1..35: mol_type = other DNA
gccctggcaccaaagtcgcacaatcaatcgtgtgc

SEQ ID NO: 1707 - DNA, 36 bp, synthetic construct
  misc_feature 1..36: note = Synthetic oligonucleotide
  source 1..36: mol_type = other DNA
gccgttggtattctgtcgtcttcctttgttctatca

SEQ ID NO: 1708 - DNA, 37 bp, synthetic construct
  misc_feature 1..37: note = Synthetic oligonucleotide
  source 1..37: mol_type = other DNA
ggcactgtgctgcgatcaggaaaagtcacataccgga

SEQ ID NO: 1709 - DNA, 38 bp, synthetic construct
  misc_feature 1..38: note = Synthetic oligonucleotide
  source 1..38: mol_type = other DNA
ggcccttgaattaacatgatgaatatcacaacgggtga

SEQ ID NO: 1710 - DNA, 36 bp, synthetic construct
  misc_feature 1..36: note = Synthetic oligonucleotide
  source 1..36: mol_type = other DNA
gggtgtttcctgcttatgactacttttctttacgca

SEQ ID NO: 1711 - DNA, 35 bp, synthetic construct
  misc_feature 1..35: note = Synthetic oligonucleotide
  source 1..35: mol_type = other DNA
ggctcgtattttcccagtatcgtttccggtacgtc

SEQ ID NO: 1712 - DNA, 35 bp, synthetic construct
  misc_feature 1..35: note = Synthetic oligonucleotide
  source 1..35: mol_type = other DNA
ggggatctcgggcgatgaagcctagctattgtact

SEQ ID NO: 1713 - DNA, 35 bp, synthetic construct
  misc_feature 1..35: note = Synthetic oligonucleotide
  source 1..35: mol_type = other DNA
ggtcccgtattccagatatactaacggttaccacc

SEQ ID NO: 1714 - DNA, 37 bp, synthetic construct
  misc_feature 1..37: note = Synthetic oligonucleotide
  source 1..37: mol_type = other DNA
gtactgtccgtgtgaacgggtctctgcagaaattcga

SEQ ID NO: 1715 - DNA, 38 bp, synthetic construct
  misc_feature 1..38: note = Synthetic oligonucleotide
  source 1..38: mol_type = other DNA
gtgatcggtactgttgaacttgttgcaccgcccgctga

SEQ ID NO: 1716 - DNA, 38 bp, synthetic construct
  misc_feature 1..38: note = Synthetic oligonucleotide
  source 1..38: mol_type = other DNA
gtgtcacatggggtgaccggattgaggagaggatatga

SEQ ID NO: 1717 - DNA, 37 bp, synthetic construct
  misc_feature 1..37: note = Synthetic oligonucleotide
  source 1..37: mol_type = other DNA
gtgtcctttctgggttgatgcatttacggtttggtga

SEQ ID NO: 1718 - DNA, 37 bp, synthetic construct
  misc_feature 1..37: note = Synthetic oligonucleotide
  source 1..37: mol_type = other DNA
gttcggttggttcccgcgctgaacaatattacctgga

SEQ ID NO: 1719 - DNA, 36 bp, synthetic construct
  misc_feature 1..36: note = Synthetic oligonucleotide
  source 1..36: mol_type = other DNA
gttgggacccgattaacccaacagaattcggaataa

SEQ ID NO: 1720 - DNA, 36 bp, synthetic construct
  misc_feature 1..36: note = Synthetic oligonucleotide
  source 1..36: mol_type = other DNA
tacctgagcgctggagctcgttagtcggaataggaa

SEQ ID NO: 1721 - DNA, 35 bp, synthetic construct
  misc_feature 1..35: note = Synthetic oligonucleotide
  source 1..35: mol_type = other DNA
tacccgttcaccggataggatgttcgtccttaatt

SEQ ID NO: 1722 - DNA, 38 bp, synthetic construct
  misc_feature 1..38: note = Synthetic oligonucleotide
  source 1..38: mol_type = other DNA
taccgatcaacccagcaaggcttgggtggattgaatga

SEQ ID NO: 1723 - DNA, 36 bp, synthetic construct
  misc_feature 1..36: note = Synthetic oligonucleotide
  source 1..36: mol_type = other DNA
tccccccgtcgcttacggtgttggacgggctcatta

SEQ ID NO: 1724 - DNA, 36 bp, synthetic construct
  misc_feature 1..36: note = Synthetic oligonucleotide
  source 1..36: mol_type = other DNA
tcttcataaatgactaacgcttcttagtgatgttga

SEQ ID NO: 1725 - DNA, 36 bp, synthetic construct
  misc_feature 1..36: note = Synthetic oligonucleotide
  source 1..36: mol_type = other DNA
tgccatacctacccagagtgagacttctagcctgga

SEQ ID NO: 1726 - DNA, 38 bp, synthetic construct
  misc_feature 1..38: note = Synthetic oligonucleotide
  source 1..38: mol_type = other DNA
tgaggtcccttttgtcggggtatatccatgaggtttga

SEQ ID NO: 1727 - DNA, 37 bp, synthetic construct
  misc_feature 1..37: note = Synthetic oligonucleotide
  source 1..37: mol_type = other DNA
tggcttggcccgttcgttcgtgatcaagattttttga

SEQ ID NO: 1728 - DNA, 38 bp, synthetic construct
  misc_feature 1..38: note = Synthetic oligonucleotide
  source 1..38: mol_type = other DNA
tggtctgaaattcccgtgaggagatagatcatttctga

SEQ ID NO: 1729 - DNA, 35 bp, synthetic construct
  misc_feature 1..35: note = Synthetic oligonucleotide
  source 1..35: mol_type = other DNA
tgtccaaatcactcattctcgtaaggttaccgtcc

SEQ ID NO: 1730 - DNA, 36 bp, synthetic construct
  misc_feature 1..36: note = Synthetic oligonucleotide
  source 1..36: mol_type = other DNA
tgttctgtcttatgccatgaagttcttataagtaga

SEQ ID NO: 1731 - DNA, 38 bp, synthetic construct
  misc_feature 1..38: note = Synthetic oligonucleotide
  source 1..38: mol_type = other DNA
ttacccctgtaatgccctacatgatgttcggttcatga

SEQ ID NO: 1732 - DNA, 35 bp, synthetic construct
  misc_feature 1..35: note = Synthetic oligonucleotide
  source 1..35: mol_type = other DNA
ttgtaccagtgcgtatgttgtctcatcaatgtttt

SEQ ID NO: 1733 - DNA, 37 bp, synthetic construct
  misc_feature 1..37: note = Synthetic oligonucleotide
  source 1..37: mol_type = other DNA
ttttagcaacgggagttgcagcggggttgttaaacga

SEQ ID NO: 1734 - DNA, 35 bp, synthetic construct; identical to SEQ ID NO: 1591
  misc_feature 1..35: note = Synthetic oligonucleotide
  source 1..35: mol_type = other DNA

SEQ ID NO: 1735 - DNA, 36 bp, synthetic construct; identical to SEQ ID NO: 1586
  misc_feature 1..36: note = Synthetic oligonucleotide
  source 1..36: mol_type = other DNA

SEQ ID NO: 1736 - DNA, 36 bp, synthetic construct; identical to SEQ ID NO: 1589
  misc_feature 1..36: note = Synthetic oligonucleotide
  source 1..36: mol_type = other DNA

SEQ ID NO: 1737 - DNA, 38 bp, synthetic construct; identical to SEQ ID NO: 1612
  misc_feature 1..38: note = Synthetic oligonucleotide
  source 1..38: mol_type = other DNA

SEQ ID NO: 1738 - DNA, 35 bp, synthetic construct; identical to SEQ ID NO: 1594
  misc_feature 1..35: note = Synthetic oligonucleotide
  source 1..35: mol_type = other DNA

SEQ ID NO: 1739 - DNA, 37 bp, synthetic construct; identical to SEQ ID NO: 1595
  misc_feature 1..37: note = Synthetic oligonucleotide
  source 1..37: mol_type = other DNA

SEQ ID NO: 1740 - DNA, 35 bp, synthetic construct
  misc_feature 1..35: note = Synthetic oligonucleotide
  source 1..35: mol_type = other DNA
attccgtgaggtacgtaaggcaaccagttttattt

SEQ ID NO: 1741 - DNA, 36 bp, synthetic construct; identical to SEQ ID NO: 1593
  misc_feature 1..36: note = Synthetic oligonucleotide
  source 1..36: mol_type = other DNA

SEQ ID NO: 1742 - DNA, 37 bp, synthetic construct; identical to SEQ ID NO: 1587
  misc_feature 1..37: note = Synthetic oligonucleotide
  source 1..37: mol_type = other DNA

SEQ ID NO: 1743 - DNA, 38 bp, synthetic construct; identical to SEQ ID NO: 1596
  misc_feature 1..38: note = Synthetic oligonucleotide
  source 1..38: mol_type = other DNA

SEQ ID NO: 1744 - DNA, 35 bp, synthetic construct; identical to SEQ ID NO: 1600
  misc_feature 1..35: note = Synthetic oligonucleotide
  source 1..35: mol_type = other DNA

SEQ ID NO: 1745 - DNA, 35 bp, synthetic construct; identical to SEQ ID NO: 1606
  misc_feature 1..35: note = Synthetic oligonucleotide
  source 1..35: mol_type = other DNA

SEQ ID NO: 1746 - DNA, 38 bp, synthetic construct; identical to SEQ ID NO: 1608
  misc_feature 1..38: note = Synthetic oligonucleotide
  source 1..38: mol_type = other DNA

SEQ ID NO: 1747 - DNA, 38 bp, synthetic construct; identical to SEQ ID NO: 1601
  misc_feature 1..38: note = Synthetic oligonucleotide
  source 1..38: mol_type = other DNA

SEQ ID NO: 1748 - DNA, 35 bp, synthetic construct; identical to SEQ ID NO: 1605
  misc_feature 1..35: note = Synthetic oligonucleotide
  source 1..35: mol_type = other DNA

SEQ ID NO: 1749 - DNA, 36 bp, synthetic construct; identical to SEQ ID NO: 1611
  misc_feature 1..36: note = Synthetic oligonucleotide
  source 1..36: mol_type = other DNA

SEQ ID NO: 1750 - DNA, 36 bp, synthetic construct
  misc_feature 1..36: note = Synthetic oligonucleotide
  source 1..36: mol_type = other DNA
tcttgtcgggattttgctcctttcatactcatggta

SEQ ID NO: 1751 - DNA, 36 bp, synthetic construct; identical to SEQ ID NO: 1598
  misc_feature 1..36: note = Synthetic oligonucleotide
  source 1..36: mol_type = other DNA

SEQ ID NO: 1752 - DNA, 35 bp, synthetic construct; identical to SEQ ID NO: 1599
  misc_feature 1..35: note = Synthetic oligonucleotide
  source 1..35: mol_type = other DNA

SEQ ID NO: 1753 - DNA, 36 bp, synthetic construct; identical to SEQ ID NO: 1603
  misc_feature 1..36: note = Synthetic oligonucleotide
  source 1..36: mol_type = other DNA

SEQ ID NO: 1754 - DNA, 38 bp, synthetic construct; identical to SEQ ID NO: 1609
  misc_feature 1..38: note = Synthetic oligonucleotide
  source 1..38: mol_type = other DNA

SEQ ID NO: 1755 - DNA, 36 bp, synthetic construct; identical to SEQ ID NO: 1593
  misc_feature 1..36: note = Synthetic oligonucleotide
  source 1..36: mol_type = other DNA

SEQ ID NO: 1756 - DNA, 35 bp, synthetic construct; identical to SEQ ID NO: 1591
  misc_feature 1..35: note = Synthetic oligonucleotide
  source 1..35: mol_type = other DNA

SEQ ID NO: 1757 - DNA, 36 bp, synthetic construct; identical to SEQ ID NO: 1590
  misc_feature 1..36: note = Synthetic oligonucleotide
  source 1..36: mol_type = other DNA

SEQ ID NO: 1758 - DNA, 36 bp, synthetic construct; identical to SEQ ID NO: 1617
  misc_feature 1..36: note = Synthetic oligonucleotide
  source 1..36: mol_type = other DNA

SEQ ID NO: 1759 - DNA, 36 bp, synthetic construct; identical to SEQ ID NO: 1616
  misc_feature 1..36: note = Synthetic oligonucleotide
  source 1..36: mol_type = other DNA

SEQ ID NO: 1760 - DNA, 36 bp, synthetic construct; identical to SEQ ID NO: 1586
  misc_feature 1..36: note = Synthetic oligonucleotide
  source 1..36: mol_type = other DNA

SEQ ID NO: 1761 - DNA, 35 bp, synthetic construct; identical to SEQ ID NO: 1620
  misc_feature 1..35: note = Synthetic oligonucleotide
  source 1..35: mol_type = other DNA

SEQ ID NO: 1762 - DNA, 35 bp, synthetic construct; identical to SEQ ID NO: 1594
  misc_feature 1..35: note = Synthetic oligonucleotide
  source 1..35: mol_type = other DNA

SEQ ID NO: 1763 - DNA, 37 bp, synthetic construct; identical to SEQ ID NO: 1587
  misc_feature 1..37: note = Synthetic oligonucleotide
  source 1..37: mol_type = other DNA

SEQ ID NO: 1764 - DNA, 38 bp, synthetic construct; identical to SEQ ID NO: 1596
  misc_feature 1..38: note = Synthetic oligonucleotide
  source 1..38: mol_type = other DNA

SEQ ID NO: 1765 - DNA, 36 bp, synthetic construct; identical to SEQ ID NO: 1589
  misc_feature 1..36: note = Synthetic oligonucleotide
  source 1..36: mol_type = other DNA

SEQ ID NO: 1766 - DNA, 37 bp, synthetic construct; identical to SEQ ID NO: 1595
  misc_feature 1..37: note = Synthetic oligonucleotide
  source 1..37: mol_type = other DNA

SEQ ID NO: 1767 - DNA, 37 bp, synthetic construct
  misc_feature 1..37: note = Synthetic oligonucleotide
  source 1..37: mol_type = other DNA
gagcgactcatcccggggtttggatcagcgctccgga

SEQ ID NO: 1768 - DNA, 37 bp, synthetic construct; identical to SEQ ID NO: 1628
  misc_feature 1..37: note = Synthetic oligonucleotide
  source 1..37: mol_type = other DNA

SEQ ID NO: 1769 - DNA, 36 bp, synthetic construct
  misc_feature 1..36: note = Synthetic oligonucleotide
  source 1..36: mol_type = other DNA
ggtctcttggtttagatcccgtcttttctgtggaaa

SEQ ID NO: 1770 - DNA, 38 bp, synthetic construct; identical to SEQ ID NO: 1601
  misc_feature 1..38: note = Synthetic oligonucleotide
  source 1..38: mol_type = other DNA

SEQ ID NO: 1771 - DNA, 35 bp, synthetic construct; identical to SEQ ID NO: 1606
  misc_feature 1..35: note = Synthetic oligonucleotide
  source 1..35: mol_type = other DNA

SEQ ID NO: 1772 - DNA, 38 bp, synthetic construct
  misc_feature 1..38: note = Synthetic oligonucleotide
  source 1..38: mol_type = other DNA
gtccaggctctatgcttagtacccgttcatttgcttga

SEQ ID NO: 1773 - DNA, 36 bp, synthetic construct; identical to SEQ ID NO: 1603
  misc_feature 1..36: note = Synthetic oligonucleotide
  source 1..36: mol_type = other DNA

SEQ ID NO: 1774 - DNA, 38 bp, synthetic construct; identical to SEQ ID NO: 1636
  misc_feature 1..38: note = Synthetic oligonucleotide
  source 1..38: mol_type = other DNA

SEQ ID NO: 1775 - DNA, 35 bp, synthetic construct; identical to SEQ ID NO: 1637
  misc_feature 1..35: note = Synthetic oligonucleotide
  source 1..35: mol_type = other DNA

SEQ ID NO: 1776 - DNA, 36 bp, synthetic construct; identical to SEQ ID NO: 1638
  misc_feature 1..36: note = Synthetic oligonucleotide
  source 1..36: mol_type = other DNA

SEQ ID NO: 1777 - DNA, 35 bp, synthetic construct
  misc_feature 1..35: note = Synthetic oligonucleotide
  source 1..35: mol_type = other DNA
tcctagaaatctgtattgtttctcaaggccacctg

SEQ ID NO: 1778 - DNA, 37 bp, synthetic construct; identical to SEQ ID NO: 1639
  misc_feature 1..37: note = Synthetic oligonucleotide
  source 1..37: mol_type = other DNA

SEQ ID NO: 1779 - DNA, 36 bp, synthetic construct; identical to SEQ ID NO: 1750
  misc_feature 1..36: note = Synthetic oligonucleotide
  source 1..36: mol_type = other DNA

SEQ ID NO: 1780 - DNA, 38 bp, synthetic construct; identical to SEQ ID NO: 1609
  misc_feature 1..38: note = Synthetic oligonucleotide
  source 1..38: mol_type = other DNA

SEQ ID NO: 1781 - DNA, 35 bp, synthetic construct
  misc_feature 1..35: note = Synthetic oligonucleotide
  source 1..35: mol_type = other DNA
tgttttatctggatcacactagctattgtacggtt

SEQ ID NO: 1782 - DNA, 37 bp, synthetic construct; identical to SEQ ID NO: 1643
  misc_feature 1..37: note = Synthetic oligonucleotide
  source 1..37: mol_type = other DNA

SEQ ID NO: 1783 - DNA, 37 bp, synthetic construct; identical to SEQ ID NO: 1645
  misc_feature 1..37: note = Synthetic oligonucleotide
  source 1..37: mol_type = other DNA

SEQ ID NO: 1784 - DNA, 37 bp, synthetic construct; identical to SEQ ID NO: 1646
  misc_feature 1..37: note = Synthetic oligonucleotide
  source 1..37: mol_type = other DNA

SEQ ID NO: 1785 - DNA, 35 bp, synthetic construct; identical to SEQ ID NO: 1647
  misc_feature 1..35: note = Synthetic oligonucleotide
  source 1..35: mol_type = other DNA

SEQ ID NO: 1786 - DNA, 35 bp, synthetic construct; identical to SEQ ID NO: 1605
  misc_feature 1..35: note = Synthetic oligonucleotide
  source 1..35: mol_type = other DNA

SEQ ID NO: 1787 - DNA, 37 bp, synthetic construct
  misc_feature 1..37: note = Synthetic oligonucleotide
  source 1..37: mol_type = other DNA
tttgagcgcctcagtttgcgcgacttccagcccgtga

SEQ ID NO: 1788 - DNA, 37 bp, synthetic construct; identical to SEQ ID NO: 1649
  misc_feature 1..37: note = Synthetic oligonucleotide
  source 1..37: mol_type = other DNA

SEQ ID NO: 1789 - DNA, 37 bp, synthetic construct; identical to SEQ ID NO: 1650
  misc_feature 1..37: note = Synthetic oligonucleotide
  source 1..37: mol_type = other DNA

SEQ ID NO: 1790 - DNA, 36 bp, synthetic construct; identical to SEQ ID NO: 1652
  misc_feature 1..36: note = Synthetic oligonucleotide
  source 1..36: mol_type = other DNA

SEQ ID NO: 1791 - DNA, 38 bp, synthetic construct; identical to SEQ ID NO: 1653
  misc_feature 1..38: note = Synthetic oligonucleotide
  source 1..38: mol_type = other DNA

SEQ ID NO: 1792 - DNA, 38 bp, synthetic construct
  misc_feature 1..38: note = Synthetic oligonucleotide
  source 1..38: mol_type = other DNA
atgctatcccgtgaaacgagaacatacggtttttttga

SEQ ID NO: 1793 - DNA, 35 bp, synthetic construct; identical to SEQ ID NO: 1654
  misc_feature 1..35: note = Synthetic oligonucleotide
  source 1..35: mol_type = other DNA

SEQ ID NO: 1794 - DNA, 36 bp, synthetic construct; identical to SEQ ID NO: 1540
  misc_feature 1..36: note = Synthetic oligonucleotide
  source 1..36: mol_type = other DNA

SEQ ID NO: 1795 - DNA, 36 bp, synthetic construct
  misc_feature 1..36: note = Synthetic oligonucleotide
  source 1..36: mol_type = other DNA
agggcaatctgtcccgccctcagcttttttatttaa

SEQ ID NO: 1796 - DNA, 37 bp, synthetic construct; identical to SEQ ID NO: 1555
  misc_feature 1..37: note = Synthetic oligonucleotide
  source 1..37: mol_type = other DNA

SEQ ID NO: 1797 - DNA, 38 bp, synthetic construct; identical to SEQ ID NO: 1543
  misc_feature 1..38: note = Synthetic oligonucleotide
  source 1..38: mol_type = other DNA

SEQ ID NO: 1798 - DNA, 38 bp, synthetic construct
  misc_feature 1..38: note = Synthetic oligonucleotide
  source 1..38: mol_type = other DNA
accgaaaacccgttcccgccgtactgcttctatattga

SEQ ID NO: 1799 - DNA, 36 bp, synthetic construct; identical to SEQ ID NO: 1549
  misc_feature 1..36: note = Synthetic oligonucleotide
  source 1..36: mol_type = other DNA

SEQ ID NO: 1800 - DNA, 36 bp, synthetic construct; identical to SEQ ID NO: 1547
  misc_feature 1..36: note = Synthetic oligonucleotide
  source 1..36: mol_type = other DNA

SEQ ID NO: 1801 - DNA, 35 bp, synthetic construct; identical to SEQ ID NO: 1550
  misc_feature 1..35: note = Synthetic oligonucleotide
  source 1..35: mol_type = other DNA

SEQ ID NO: 1802 - DNA, 35 bp, synthetic construct; identical to SEQ ID NO: 1551
  misc_feature 1..35: note = Synthetic oligonucleotide
  source 1..35: mol_type = other DNA

SEQ ID NO: 1803 - DNA, 35 bp, synthetic construct; identical to SEQ ID NO: 1546
  misc_feature 1..35: note = Synthetic oligonucleotide
  source 1..35: mol_type = other DNA

SEQ ID NO: 1804 - DNA, 38 bp, synthetic construct
  misc_feature 1..38: note = Synthetic oligonucleotide
  source 1..38: mol_type = other DNA
tttccgattattatgaccgcttttattattggaggtga

SEQ ID NO: 1805 - DNA, 38 bp, synthetic construct
  misc_feature 1..38: note = Synthetic oligonucleotide
  source 1..38: mol_type = other DNA
tcttggacgtgcgtgatccccattttatatatgattga

SEQ ID NO: 1806 - DNA, 38 bp, synthetic construct; identical to SEQ ID NO: 1543
  misc_feature 1..38: note = Synthetic oligonucleotide
  source 1..38: mol_type = other DNA

SEQ ID NO: 1807 - DNA, 36 bp, synthetic construct; identical to SEQ ID NO: 1553
  misc_feature 1..36: note = Synthetic oligonucleotide
  source 1..36: mol_type = other DNA

SEQ ID NO: 1808 - DNA, 36 bp, synthetic construct; identical to SEQ ID NO: 1540
  misc_feature 1..36: note = Synthetic oligonucleotide
  source 1..36: mol_type = other DNA

SEQ ID NO: 1809 - DNA, 37 bp, synthetic construct; identical to SEQ ID NO: 1542
  misc_feature 1..37: note = Synthetic oligonucleotide
  source 1..37: mol_type = other DNA

SEQ ID NO: 1810 - DNA, 36 bp, synthetic construct; identical to SEQ ID NO: 1549
  misc_feature 1..36: note = Synthetic oligonucleotide
  source 1..36: mol_type = other DNA

SEQ ID NO: 1811 - DNA, 35 bp, synthetic construct; identical to SEQ ID NO: 1551
  misc_feature 1..35: note = Synthetic oligonucleotide
  source 1..35: mol_type = other DNA

SEQ ID NO: 1812 - DNA, 38 bp, synthetic construct; identical to SEQ ID NO: 1805
  misc_feature 1..38: note = Synthetic oligonucleotide
  source 1..38: mol_type = other DNA

SEQ ID NO: 1813 - DNA, 35 bp, synthetic construct; identical to SEQ ID NO: 1546
  misc_feature 1..35: note = Synthetic oligonucleotide
  source 1..35: mol_type = other DNA

SEQ ID NO: 1814 - DNA, 38 bp, synthetic construct
  misc_feature 1..38: note = Synthetic oligonucleotide
  source 1..38: mol_type = other DNA
tgcccttagtttccgtatgaccactttgattcttttga

SEQ ID NO: 1815 - DNA, 38 bp, synthetic construct; identical to SEQ ID NO: 1804
  misc_feature 1..38: note = Synthetic oligonucleotide
  source 1..38: mol_type = other DNA

SEQ ID NO: 1816 - DNA, 38 bp, synthetic construct
  misc_feature 1..38: note = Synthetic oligonucleotide
  source 1..38: mol_type = other DNA
attcgcatagcctatgggaagggaattgtgaggggtga

SEQ ID NO: 1817 - DNA, 38 bp, synthetic construct
  misc_feature 1..38: note = Synthetic oligonucleotide
  source 1..38: mol_type = other DNA
gaggttccctgtgggtcatgtcgcacgatttttagtga

SEQ ID NO: 1818 - DNA, 38 bp, synthetic construct; identical to SEQ ID NO: 1543
  misc_feature 1..38: note = Synthetic oligonucleotide
  source 1..38: mol_type = other DNA

SEQ ID NO: 1819 - DNA, 38 bp, synthetic construct; identical to SEQ ID NO: 1548
  misc_feature 1..38: note = Synthetic oligonucleotide
  source 1..38: mol_type = other DNA

SEQ ID NO: 1820 - DNA, 37 bp, synthetic construct
  misc_feature 1..37: note = Synthetic oligonucleotide
  source 1..37: mol_type = other DNA
tgcccgcttttggtttatatggcttcttatctttcga

SEQ ID NO: 1821 - DNA, 38 bp, synthetic construct; identical to SEQ ID NO: 1804
  misc_feature 1..38: note = Synthetic oligonucleotide
  source 1..38: mol_type = other DNA

SEQ ID NO: 1822 - DNA, 35 bp, synthetic construct; identical to SEQ ID NO: 1550
  misc_feature 1..35: note = Synthetic oligonucleotide
  source 1..35: mol_type = other DNA

SEQ ID NO: 1823 - DNA, 38 bp, synthetic construct
  misc_feature 1..38: note = Synthetic oligonucleotide
  source 1..38: mol_type = other DNA
aaacgtgggggcgtcccagccccatgtgttatctctga

SEQ ID NO: 1824 - DNA, 38 bp, synthetic construct
  misc_feature 1..38: note = Synthetic oligonucleotide
  source 1..38: mol_type = other DNA
aaccctctcccatcctctcgaaacactagattacctga

SEQ ID NO: 1825 - DNA, 35 bp, synthetic construct
  misc_feature 1..35: note = Synthetic oligonucleotide
  source 1..35: mol_type = other DNA
aacatacgtcccaagcgcatctcgattctatcttc

SEQ ID NO: 1826 - DNA, 37 bp, synthetic construct
  misc_feature 1..37: note = Synthetic oligonucleotide
  source 1..37: mol_type = other DNA
aaccacgcctaaatggattcacttcctcaaaaattga

SEQ ID NO: 1827 - DNA, 37 bp, synthetic construct
  misc_feature 1..37: note = Synthetic oligonucleotide
  source 1..37: mol_type = other DNA
aacgccgcacttcgttaaaagtctataaaactctaga

SEQ ID NO: 1828 - DNA, 37 bp, synthetic construct
  misc_feature 1..37: note = Synthetic oligonucleotide
  source 1..37: mol_type = other DNA
aacgaagtattataacccttgtgtatcccgaccatga

SEQ ID NO: 1829 - DNA, 35 bp, synthetic construct
  misc_feature 1..35: note = Synthetic oligonucleotide
  source 1..35: mol_type = other DNA
aacaaagttcacccataccacaaccccaattcgac

SEQ ID NO: 1830 - DNA, 38 bp, synthetic construct
  misc_feature 1..38: note = Synthetic oligonucleotide
  source 1..38: mol_type = other DNA
aacggctgggaggggtagcattttaactatatttctga

SEQ ID NO: 1831 - DNA, 38 bp, synthetic construct
  misc_feature 1..38: note = Synthetic oligonucleotide
  source 1..38: mol_type = other DNA
aagtggtccgtttcggcaataagtacaacgggatctga

SEQ ID NO: 1832 - DNA, 38 bp, synthetic construct
  misc_feature 1..38: note = Synthetic oligonucleotide
  source 1..38: mol_type = other DNA
aactctgcataactaaccgacgccaactattatcctga

SEQ ID NO: 1833 - DNA, 36 bp, synthetic construct
  misc_feature 1..36: note = Synthetic oligonucleotide
  source 1..36: mol_type = other DNA
aatcaggcttgtttgctagacaaaataagcacgaaa

SEQ ID NO: 1834 - DNA, 38 bp, synthetic construct
  misc_feature 1..38: note = Synthetic oligonucleotide
  source 1..38: mol_type = other DNA
aattgcgttttccggttgactaaaaacacggaatctga

SEQ ID NO: 1835 - DNA, 36 bp, synthetic construct
  misc_feature 1..36: note = Synthetic oligonucleotide
  source 1..36: mol_type = other DNA
aataaacacttcgaccaaactaaggccttatctcca

SEQ ID NO: 1836 - DNA, 38 bp, synthetic construct
  misc_feature 1..38: note = Synthetic oligonucleotide
  source 1..38: mol_type = other DNA
aagtttcctggtcgcccgcttctgaaaagttagtttga

SEQ ID NO: 1837 - DNA, 38 bp, synthetic construct
  misc_feature 1..38: note = Synthetic oligonucleotide
  source 1..38: mol_type = other DNA
aagagggctatgatttagccggtgcctccttgctttga

SEQ ID NO: 1838 - DNA, 37 bp, synthetic construct
  misc_feature 1..37: note = Synthetic oligonucleotide
  source 1..37: mol_type = other DNA
aagccggtatcgcccgtaacattcccttcctctagga

SEQ ID NO: 1839 - DNA, 38 bp, synthetic construct
  misc_feature 1..38: note = Synthetic oligonucleotide
  source 1..38: mol_type = other DNA
aacttcaccgatacggttcttttctctaacccgcttga

SEQ ID NO: 1840 - DNA, 37 bp, synthetic construct
  misc_feature 1..37: note = Synthetic oligonucleotide
  source 1..37: mol_type = other DNA
aaggatagccataggctgatggggactcaacaggtga

SEQ ID NO: 1841 - DNA, 36 bp, synthetic construct
  misc_feature 1..36: note = Synthetic oligonucleotide
  source 1..36: mol_type = other DNA
aatcgtcttacgtgcccttgataaatcccatactaa

SEQ ID NO: 1842 - DNA, 38 bp, synthetic construct
  misc_feature 1..38: note = Synthetic oligonucleotide
  source 1..38: mol_type = other DNA
aattcgcgcgaattgaagaggcccatggcccgctctga

SEQ ID NO: 1843 - DNA, 37 bp, synthetic construct
  misc_feature 1..37: note = Synthetic oligonucleotide
  source 1..37: mol_type = other DNA
accatgaatcaccgcgcctgctactgcaacttttgga

SEQ ID NO: 1844 - DNA, 36 bp, synthetic construct
  misc_feature 1..36: note = Synthetic oligonucleotide
  source 1..36: mol_type = other DNA
acactggcatttttcgaaacatagaatgaatgggaa

SEQ ID NO: 1845 - DNA, 37 bp, synthetic construct
  misc_feature 1..37: note = Synthetic oligonucleotide
  source 1..37: mol_type = other DNA
acacccacaagctttaacttatcataactcgccccga

SEQ ID NO: 1846 - DNA, 35 bp, synthetic construct
  misc_feature 1..35: note = Synthetic oligonucleotide
  source 1..35: mol_type = other DNA
acccaacgttgagcgcaataccccttcataatacc

SEQ ID NO: 1847 - DNA, 35 bp, synthetic construct
  misc_feature 1..35: note = Synthetic oligonucleotide
  source 1..35: mol_type = other DNA
acctctctctgaaatttaactctattctcccattc

SEQ ID NO: 1848 - DNA, 35 bp, synthetic construct
  misc_feature 1..35: note = Synthetic oligonucleotide
  source 1..35: mol_type = other DNA
accggactagatatttaccacattgcatttccata

SEQ ID NO: 1849 - DNA, 35 bp, synthetic construct
  misc_feature 1..35: note = Synthetic oligonucleotide
  source 1..35: mol_type = other DNA
acgctgaatctggttcacaacggggaacgtgttag

SEQ ID NO: 1850 - DNA, 38 bp, synthetic construct
  misc_feature 1..38: note = Synthetic oligonucleotide
  source 1..38: mol_type = other DNA
acccgctgtgtgaaccaccgtgccttcggacgtcatga

SEQ ID NO: 1851 - DNA, 35 bp, synthetic construct
  misc_feature 1..35: note = Synthetic oligonucleotide
  source 1..35: mol_type = other DNA
accgctctctgaaatttatctctattctcccattc

SEQ ID NO: 1852 - DNA, 36 bp, synthetic construct
  misc_feature 1..36: note = Synthetic oligonucleotide
  source 1..36: mol_type = other DNA
acggtacactcactttcctaaatccctctttatcta

SEQ ID NO: 1853 - DNA, 38 bp, synthetic construct
  misc_feature 1..38: note = Synthetic oligonucleotide
  source 1..38: mol_type = other DNA
acgccccagcctatttaccttggagtttctttgactga

SEQ ID NO: 1854 - DNA, 35 bp, synthetic construct
  misc_feature 1..35: note = Synthetic oligonucleotide
  source 1..35: mol_type = other DNA
acccggcgaagacgttagctctggcgctccgttca

SEQ ID NO: 1855 - DNA, 38 bp, synthetic construct
  misc_feature 1..38: note = Synthetic oligonucleotide
  source 1..38: mol_type = other DNA
actatcccaggtttacattagtgtgccccgcattctga

SEQ ID NO: 1856 - DNA, 38 bp, synthetic construct
  misc_feature 1..38: note = Synthetic oligonucleotide
  source 1..38: mol_type = other DNA
actgctttttttgcccaatatctcgagtaaccccctga

SEQ ID NO: 1857 - DNA, 35 bp, synthetic construct
  misc_feature 1..35: note = Synthetic oligonucleotide
  source 1..35: mol_type = other DNA
actgaacactctacatgaccataaacacctctctt

SEQ ID NO: 1858 - DNA, 37 bp, synthetic construct
  misc_feature 1..37: note = Synthetic oligonucleotide
  source 1..37: mol_type = other DNA
actcgggcttccatcaagcttctgattggtgaggtga

SEQ ID NO: 1859 - DNA, 35 bp, synthetic construct
  misc_feature 1..35: note = Synthetic oligonucleotide
  source 1..35: mol_type = other DNA
actgaacactctacatgactgtaaacacctctctt

SEQ ID NO: 1860 - DNA, 38 bp, synthetic construct
  misc_feature 1..38: note = Synthetic oligonucleotide
  source 1..38: mol_type = other DNA
acgtttttctcgctcgtaattttatcgttaatttctga

SEQ ID NO: 1861 - DNA, 37 bp, synthetic construct
  misc_feature 1..37: note = Synthetic oligonucleotide
  source 1..37: mol_type = other DNA
actactcatccccccgtcttaacaacgatcccactga

SEQ ID NO: 1862 - DNA, 37 bp, synthetic construct
  misc_feature 1..37: note = Synthetic oligonucleotide
  source 1..37: mol_type = other DNA
actacgcgctcatcggccagagttccggtcaaccgga

SEQ ID NO: 1863 - DNA, 36 bp, synthetic construct
  misc_feature 1..36: note = Synthetic oligonucleotide
  source 1..36: mol_type = other DNA
acttcacccacacaatacccttatcgataactcaaa

SEQ ID NO: 1864 - DNA, 36 bp, synthetic construct
  misc_feature 1..36: note = Synthetic oligonucleotide
  source 1..36: mol_type = other DNA
acgttacgccgggggactataagcagttcagtagca

SEQ ID NO: 1865 - DNA, 36 bp, synthetic construct
  misc_feature 1..36: note = Synthetic oligonucleotide
  source 1..36: mol_type = other DNA
agacctattccccaatcctgaattacaacatctcta

SEQ ID NO: 1866 - DNA, 35 bp, synthetic construct
  misc_feature 1..35: note = Synthetic oligonucleotide
  source 1..35: mol_type = other DNA
agcacccgcccgcttctattcctcgatcctacact

SEQ ID NO: 1867 - DNA, 35 bp, synthetic construct
  misc_feature 1..35: note = Synthetic oligonucleotide
  source 1..35: mol_type = other DNA
agccccagagtttatccggcttggccggcaattcc

SEQ ID NO: 1868 - DNA, 35 bp, synthetic construct
  misc_feature 1..35: note = Synthetic oligonucleotide
  source 1..35: mol_type = other DNA
aggaatcgatcctggtggttttagctttgaccctt

SEQ ID NO: 1869 - DNA, 37 bp, synthetic construct
  misc_feature 1..37: note = Synthetic oligonucleotide
  source 1..37: mol_type = other DNA
agacttagactcaataactggaccctttacacaccgt

SEQ ID NO: 1870 - DNA, 37 bp, synthetic construct; identical to SEQ ID NO: 1555
  misc_feature 1..37: note = Synthetic oligonucleotide
  source 1..37: mol_type = other DNA

SEQ ID NO: 1871 - DNA, 38 bp, synthetic construct
  misc_feature 1..38: note = Synthetic oligonucleotide
  source 1..38: mol_type = other DNA
atacacgctgcccatttccactcgtcaaaccactatga

SEQ ID NO: 1872 - DNA, 35 bp, synthetic construct
  misc_feature 1..35: note = Synthetic oligonucleotide
  source 1..35: mol_type = other DNA
agttcgcgcaaccccttctcgcttgtgtggcttaa

SEQ ID NO: 1873 - DNA, 35 bp, synthetic construct
  misc_feature 1..35: note = Synthetic oligonucleotide
  source 1..35: mol_type = other DNA
atcaagccggtgtaggcgctccaggcctttcagcc

SEQ ID NO: 1874 - DNA, 35 bp, synthetic construct
  misc_feature 1..35: note = Synthetic oligonucleotide
  source 1..35: mol_type = other DNA
agtcatccattacctcaatgttcatctattttcac

SEQ ID NO: 1875 - DNA, 38 bp, synthetic construct
  misc_feature 1..38: note = Synthetic oligonucleotide
  source 1..38: mol_type = other DNA
atcctctacgttccaaccacttacttttatgccattga

SEQ ID NO: 1876 - DNA, 38 bp, synthetic construct
  misc_feature 1..38: note = Synthetic oligonucleotide
  source 1..38: mol_type = other DNA
atcacactctaactgtaatcaatcatttcgaaccctga

SEQ ID NO: 1877 - DNA, 38 bp, synthetic construct
  misc_feature 1..38: note = Synthetic oligonucleotide
  source 1..38: mol_type = other DNA
atcccttccaattccctataattactactctaatgtga

SEQ ID NO: 1878 - DNA, 37 bp, synthetic construct
  misc_feature 1..37: note = Synthetic oligonucleotide
  source 1..37: mol_type = other DNA
atcccacttgccatcttcggtcctatcaaatggtaga

SEQ ID NO: 1879 - DNA, 34 bp, synthetic construct
  misc_feature 1..34: note = Synthetic oligonucleotide
  source 1..34: mol_type = other DNA
atcttaatgccttgatccgactcctacctcttga

SEQ ID NO: 1880 - DNA, 38 bp, synthetic construct
  misc_feature 1..38: note = Synthetic oligonucleotide
  source 1..38: mol_type = other DNA
atgccccccgcgcttttaactcacacctgctctgctga

SEQ ID NO: 1881 - DNA, 35 bp, synthetic construct
  misc_feature 1..35: note = Synthetic oligonucleotide
  source 1..35: mol_type = other DNA
atgcagtcgttaacgtccatcgcgtgtgtcttccg

SEQ ID NO: 1882 - DNA, 38 bp, synthetic construct
  misc_feature 1..38: note = Synthetic oligonucleotide
  source 1..38: mol_type = other DNA
atcccttttattgttaaacttcatagaaatcatactga

SEQ ID NO: 1883 - DNA, 37 bp, synthetic construct
  misc_feature 1..37: note = Synthetic oligonucleotide
  source 1..37: mol_type = other DNA
atcttcccgccacttgtgccttatcattaccccccga

SEQ ID NO: 1884 - DNA, 36 bp, synthetic construct
  misc_feature 1..36: note = Synthetic oligonucleotide
  source 1..36: mol_type = other DNA
atcccaattcacatacactctcaccctcactaaaca

SEQ ID NO: 1885 - DNA, 36 bp, synthetic construct
  misc_feature 1..36: note = Synthetic oligonucleotide
  source 1..36: mol_type = other DNA
atctacaccctatcgaaacttcccatgaaactacaa

SEQ ID NO: 1886 - DNA, 35 bp, synthetic construct
  misc_feature 1..35: note = Synthetic oligonucleotide
  source 1..35: mol_type = other DNA
attggtgcccgttgtgaggatcaagcaacatgcta

SEQ ID NO: 1887 - DNA, 38 bp, synthetic construct
  misc_feature 1..38: note = Synthetic oligonucleotide
  source 1..38: mol_type = other DNA
caaacgtaccttactgcatacaccttccctgttattga

SEQ ID NO: 1888 - DNA, 35 bp, synthetic construct
  misc_feature 1..35: note = Synthetic oligonucleotide
  source 1..35: mol_type = other DNA
attgaacgagcgagaaatctaagcgccggcatctg

SEQ ID NO: 1889 - DNA, 35 bp, synthetic construct
  misc_feature 1..35: note = Synthetic oligonucleotide
  source 1..35: mol_type = other DNA
atttcctaacattgctctcttaactgttcctatcc

SEQ ID NO: 1890 - DNA, 37 bp, synthetic construct
  misc_feature 1..37: note = Synthetic oligonucleotide
  source 1..37: mol_type = other DNA
cacctggccattacactttccttttgagttctctcga

SEQ ID NO: 1891 - DNA, 38 bp, synthetic construct
  misc_feature 1..38: note = Synthetic oligonucleotide
  source 1..38: mol_type = other DNA
attttagcatacggctccttggtttcatcagctgttga

SEQ ID NO: 1892 - DNA, 35 bp, synthetic construct
  misc_feature 1..35: note = Synthetic oligonucleotide
  source 1..35: mol_type = other DNA
attcgaattctccacctgataaccgccacattaaa

SEQ ID NO: 1893 - DNA, 36 bp, synthetic construct
  misc_feature 1..36: note = Synthetic oligonucleotide
  source 1..36: mol_type = other DNA
atgtttgtcggcctttgtgggtcctttcgcttccca

SEQ ID NO: 1894 - DNA, 38 bp, synthetic construct
  misc_feature 1..38: note = Synthetic oligonucleotide
  source 1..38: mol_type = other DNA
ccgcaacccaactcgtattctaatctactacacattga

SEQ ID NO: 1895 - DNA, 36 bp, synthetic construct; identical to SEQ ID NO: 1541
  misc_feature 1..36: note = Synthetic oligonucleotide
  source 1..36: mol_type = other DNA

SEQ ID NO: 1896 - DNA, 35 bp, synthetic construct
  misc_feature 1..35: note = Synthetic oligonucleotide
  source 1..35: mol_type = other DNA
ccccaaggacgcacgggggtacccgcatactgtta

SEQ ID NO: 1897 - DNA, 36 bp, synthetic construct
  misc_feature 1..36: note = Synthetic oligonucleotide
  source 1..36: mol_type = other DNA
ccagccggtccaggtggctgacccgcgaaggagcta

SEQ ID NO: 1898 - DNA, 37 bp, synthetic construct
  misc_feature 1..37: note = Synthetic oligonucleotide
  source 1..37: mol_type = other DNA
cccgtcatgaaccgggacccaatcttaccttttatga

SEQ ID NO: 1899 - DNA, 37 bp, synthetic construct
  misc_feature 1..37: note = Synthetic oligonucleotide
  source 1..37: mol_type = other DNA
ccgcgcgttagctacggatggcattaacccagttgga

SEQ ID NO: 1900 - DNA, 38 bp, synthetic construct
  misc_feature 1..38: note = Synthetic oligonucleotide
  source 1..38: mol_type = other DNA
catggctctcatccgaagacgcgccttcttctatttga

SEQ ID NO: 1901 - DNA, 38 bp, synthetic construct
  misc_feature 1..38: note = Synthetic oligonucleotide
  source 1..38: mol_type = other DNA
ccgctggcgctattttttttctatgctgttggagctga

SEQ ID NO: 1902 - DNA, 36 bp, synthetic construct
  misc_feature 1..36: note = Synthetic oligonucleotide
  source 1..36: mol_type = other DNA
catggatttagtcgtccctagccgaacttctgttaa

SEQ ID NO: 1903 - DNA, 38 bp, synthetic construct
  misc_feature 1..38: note = Synthetic oligonucleotide
  source 1..38: mol_type = other DNA
ccgcttaacggggcacccaactaattcgatatctctga

SEQ ID NO: 1904 - DNA, 36 bp, synthetic construct
  misc_feature 1..36: note = Synthetic oligonucleotide
  source 1..36: mol_type = other DNA
cggtccgtcgacccatgttttttggctctattgcta

SEQ ID NO: 1905 - DNA, 36 bp, synthetic construct; identical to SEQ ID NO: 1540
  misc_feature 1..36: note = Synthetic oligonucleotide
  source 1..36: mol_type = other DNA

SEQ ID NO: 1906 - DNA, 38 bp, synthetic construct
  misc_feature 1..38: note = Synthetic oligonucleotide
  source 1..38: mol_type = other DNA
cgctattattactctccccgggtaatatcctatattga

SEQ ID NO: 1907 - DNA, 36 bp, synthetic construct
  misc_feature 1..36: note = Synthetic oligonucleotide
  source 1..36: mol_type = other DNA
ccttgaaaggtgtaacgcacgttggatcgtcgtgaa

SEQ ID NO: 1908 - DNA, 36 bp, synthetic construct
  misc_feature 1..36: note = Synthetic oligonucleotide
  source 1..36: mol_type = other DNA
cgacgaaaccggacaccatacccttacgacttttaa

SEQ ID NO: 1909 - DNA, 35 bp, synthetic construct
  misc_feature 1..35: note = Synthetic oligonucleotide
  source 1..35: mol_type = other DNA
ccttaccccgagcgtgcccccttcttaagtattcg

SEQ ID NO: 1910 - DNA, 36 bp, synthetic construct
  misc_feature 1..36: note = Synthetic oligonucleotide
  source 1..36: mol_type = other DNA
cgttttatagtttcgatctaaggttcattatatata

SEQ ID NO: 1911 - DNA, 38 bp, synthetic construct
  misc_feature 1..38: note = Synthetic oligonucleotide
  source 1..38: mol_type = other DNA
cgcttaattcttggttatattatctaactacgcaatga

SEQ ID NO: 1912 - DNA, 37 bp, synthetic construct
  misc_feature 1..37: note = Synthetic oligonucleotide
  source 1..37: mol_type = other DNA
ctctaccgagtcccttacatatgtacccacttccaga

SEQ ID NO: 1913 - DNA, 37 bp, synthetic construct
  misc_feature 1..37: note = Synthetic oligonucleotide
  source 1..37: mol_type = other DNA
gaacccgagggagggattctcaatgtgcaatgtatga

SEQ ID NO: 1914 - DNA, 38 bp, synthetic construct
  misc_feature 1..38: note = Synthetic oligonucleotide
  source 1..38: mol_type = other DNA
cttcggggcactaccttcgtttttttgttctactatga

SEQ ID NO: 1915 - DNA, 37 bp, synthetic construct
  misc_feature 1..37: note = Synthetic oligonucleotide
  source 1..37: mol_type = other DNA
gaagccccataaaagacgccgaaatattgcatctgga

SEQ ID NO: 1916 - DNA, 37 bp, synthetic construct
  misc_feature 1..37: note = Synthetic oligonucleotide
  source 1..37: mol_type = other DNA
gaaactaaaccgactgggttaaattttatcatgcgga

SEQ ID NO: 1917 - DNA, 37 bp, synthetic construct
  misc_feature 1..37: note = Synthetic oligonucleotide
  source 1..37: mol_type = other DNA
gagcttaaacctctccgagcgcttatggctcgattga

SEQ ID NO: 1918 - DNA, 35 bp, synthetic construct
  misc_feature 1..35: note = Synthetic oligonucleotide
  source 1..35: mol_type = other DNA
gaggaaacgcggcagccttataggccgatctttca

SEQ ID NO: 1919 - DNA, 38 bp, synthetic construct
  misc_feature 1..38: note = Synthetic oligonucleotide
  source 1..38: mol_type = other DNA
gaggtttaataaataggccatgcttattggtccgctga

SEQ ID NO: 1920 - DNA, 37 bp, synthetic construct
  misc_feature 1..37: note = Synthetic oligonucleotide
  source 1..37: mol_type = other DNA
gatcacgtcgcggattcccccgtttcgcgagaggaga

SEQ ID NO: 1921 - DNA, 37 bp, synthetic construct
  misc_feature 1..37: note = Synthetic oligonucleotide
  source 1..37: mol_type = other DNA
gagttcctttatttgcatttttatcagatcaagttta

SEQ ID NO: 1922 - DNA, 36 bp, synthetic construct
  misc_feature 1..36: note = Synthetic oligonucleotide
  source 1..36: mol_type = other DNA
gagtcctctacttcatataatctccagaggggggga

SEQ ID NO: 1923 - DNA, 35 bp, synthetic construct
  misc_feature 1..35: note = Synthetic oligonucleotide
  source 1..35: mol_type = other DNA
gagtttcgatattcgtcttaaatccacccctgtaa

SEQ ID NO: 1924 - DNA, 36 bp, synthetic construct
  misc_feature 1..36: note = Synthetic oligonucleotide
  source 1..36: mol_type = other DNA
gagtacgatttgaccactatcttcgtagattccata

SEQ ID NO: 1925 - DNA, 37 bp, synthetic construct
  misc_feature 1..37: note = Synthetic oligonucleotide
  source 1..37: mol_type = other DNA
gataacgggaaccaaatcgcgctgtagaggcctggga

SEQ ID NO: 1926 - DNA, 36 bp, synthetic construct
  misc_feature 1..36: note = Synthetic oligonucleotide
  source 1..36: mol_type = other DNA
gatctacccgaccctattaaccttagtacttgacaa

SEQ ID NO: 1927 - DNA, 38 bp, synthetic construct
  misc_feature 1..38: note = Synthetic oligonucleotide
  source 1..38: mol_type = other DNA
gatccctaattgttttcctattaatcgttttcccatga

SEQ ID NO: 1928 - DNA, 36 bp, synthetic construct
  misc_feature 1..36: note = Synthetic oligonucleotide
  source 1..36: mol_type = other DNA
gatcgctcgccaggcacactgccgtttcgagtatta

SEQ ID NO: 1929 - DNA, 36 bp, synthetic construct
  misc_feature 1..36: note = Synthetic oligonucleotide
  source 1..36: mol_type = other DNA
gcacgacgaacgagtccgggaggaccggcttcccca

SEQ ID NO: 1930 - DNA, 35 bp, synthetic construct
  misc_feature 1..35: note = Synthetic oligonucleotide
  source 1..35: mol_type = other DNA
gatcttatccggcccacatctttaaccccaacact

SEQ ID NO: 1931 - DNA, 35 bp, synthetic construct
  misc_feature 1..35: note = Synthetic oligonucleotide
  source 1..35: mol_type = other DNA
gccgtctcggggtaatcggcctaatacgtagacat

SEQ ID NO: 1932 - DNA, 37 bp, synthetic construct
  misc_feature 1..37: note = Synthetic oligonucleotide
  source 1..37: mol_type = other DNA
gccgcggggggccggggaggtcccatcgaggttatga

SEQ ID NO: 1933 - DNA, 38 bp, synthetic construct
  misc_feature 1..38: note = Synthetic oligonucleotide
  source 1..38: mol_type = other DNA
gctaacctttgttatactaggactttctccacaggtga

SEQ ID NO: 1934 - DNA, 35 bp, synthetic construct
  misc_feature 1..35: note = Synthetic oligonucleotide
  source 1..35: mol_type = other DNA
ggggtttcttggagcgcaatacggtttgtttctga

SEQ ID NO: 1935 - DNA, 35 bp, synthetic construct
  misc_feature 1..35: note = Synthetic oligonucleotide
  source 1..35: mol_type = other DNA
ggcgaaactagcctggattggagttagacctttca

SEQ ID NO: 1936 - DNA, 38 bp, synthetic construct
  misc_feature 1..38: note = Synthetic oligonucleotide
  source 1..38: mol_type = other DNA
gggggagttgcatggttgcaactctggaggccctttga

SEQ ID NO: 1937 - DNA, 37 bp, synthetic construct
  misc_feature 1..37: note = Synthetic oligonucleotide
  source 1..37: mol_type = other DNA
gggtttaacgtgcccacccgtcagggtagtcctacga

SEQ ID NO: 1938 - DNA, 35 bp, synthetic construct
  misc_feature 1..35: note = Synthetic oligonucleotide
  source 1..35: mol_type = other DNA
gggtatgccgttctgtccgggccttatgcgcatat

SEQ ID NO: 1939 - DNA, 37 bp, synthetic construct
  misc_feature 1..37: note = Synthetic oligonucleotide
  source 1..37: mol_type = other DNA
gggacaatagaattaaactcgggcttaggtcctcgga

SEQ ID NO: 1940 - DNA, 37 bp, synthetic construct
  misc_feature 1..37: note = Synthetic oligonucleotide
  source 1..37: mol_type = other DNA
ggggagatggctgggtcttgataccggaaacttgcga

SEQ ID NO: 1941 - DNA, 38 bp, synthetic construct
  misc_feature 1..38: note = Synthetic oligonucleotide
  source 1..38: mol_type = other DNA
ggcttgtatacctattatgttaggcaggtgccctttga

SEQ ID NO: 1942 - DNA, 36 bp, synthetic construct
  misc_feature 1..36: note = Synthetic oligonucleotide
  source 1..36: mol_type = other DNA
gtggcccggttgtgttgtcacggacgtgcggtccca

SEQ ID NO: 1943 - DNA, 36 bp, synthetic construct
  misc_feature 1..36: note = Synthetic oligonucleotide
  source 1..36: mol_type = other DNA
gtgttgtatgtcttcgcaatcctagccgaccgccaa

SEQ ID NO: 1944 - DNA, 38 bp, synthetic construct
  misc_feature 1..38: note = Synthetic oligonucleotide
  source 1..38: mol_type = other DNA
gtgcgcgttggtgggccgcttgtaactataccctttga

SEQ ID NO: 1945 - DNA, 35 bp, synthetic construct
  misc_feature 1..35: note = Synthetic oligonucleotide
  source 1..35: mol_type = other DNA
gttttggtggttcaaaccggtcgcccactggcatt

SEQ ID NO: 1946 - DNA, 36 bp, synthetic construct
  misc_feature 1..36: note = Synthetic oligonucleotide
  source 1..36: mol_type = other DNA
tacatcccggctagatccgtgaggactggcggtgtc

SEQ ID NO: 1947 - DNA, 38 bp, synthetic construct
  misc_feature 1..38: note = Synthetic oligonucleotide
  source 1..38: mol_type = other DNA
taaaagaactcttttcgtcaaccatacctcaggcctga

SEQ ID NO: 1948 - DNA, 37 bp, synthetic construct
  misc_feature 1..37: note = Synthetic oligonucleotide
  source 1..37: mol_type = other DNA
tagtccatatatagcttaaactgatgcgggggttcga

SEQ ID NO: 1949 - DNA, 35 bp, synthetic construct
  misc_feature 1..35: note = Synthetic oligonucleotide
  source 1..35: mol_type = other DNA
tacccttatcggcacccccacacttatggtaattc

SEQ ID NO: 1950 - DNA, 36 bp, synthetic construct
  misc_feature 1..36: note = Synthetic oligonucleotide
  source 1..36: mol_type = other DNA
tacgggaatgggtttggccctaaaagccagacacga

SEQ ID NO: 1951 - DNA, 36 bp, synthetic construct
  misc_feature 1..36: note = Synthetic oligonucleotide
  source 1..36: mol_type = other DNA
tagctaacggtcccaacaagcatgttgggattggca

SEQ ID NO: 1952 - DNA, 38 bp, synthetic construct
  misc_feature 1..38: note = Synthetic oligonucleotide
  source 1..38: mol_type = other DNA
tacgccatgatacttacatctagccaccttttttttga

SEQ ID NO: 1953 - DNA, 36 bp, synthetic construct
  misc_feature 1..36: note = Synthetic oligonucleotide
  source 1..36: mol_type = other DNA
tatatctggccaccggcgggggggctggtgatctta

SEQ ID NO: 1954 - DNA, 36 bp, synthetic construct; identical to SEQ ID NO: 1720
  misc_feature 1..36: note = Synthetic oligonucleotide
  source 1..36: mol_type = other DNA

SEQ ID NO: 1955 - DNA, 38 bp, synthetic construct
  misc_feature 1..38: note = Synthetic oligonucleotide
  source 1..38: mol_type = other DNA
tatcaaattcggtcgtagtatttgtcgccgtaacgtta

SEQ ID NO: 1956 - DNA, 38 bp, synthetic construct
  misc_feature 1..38: note = Synthetic oligonucleotide
  source 1..38: mol_type = other DNA
tactagcgatcatttgttcgctttgggttggttattga

SEQ ID NO: 1957 - DNA, 35 bp, synthetic construct
  misc_feature 1..35: note = Synthetic oligonucleotide
  source 1..35: mol_type = other DNA
taggtggtcgtgcctacattgactgtttccatcca

SEQ ID NO: 1958 - DNA, 35 bp, synthetic construct
  misc_feature 1..35: note = Synthetic oligonucleotide
  source 1..35: mol_type = other DNA
tactccggcccaactatatacttctccacacctcc

SEQ ID NO: 1959 - DNA, 37 bp, synthetic construct
  misc_feature 1..37: note = Synthetic oligonucleotide
  source 1..37: mol_type = other DNA
tatcacgacttcccaccttcttccgcctttgtcccaa

SEQ ID NO: 1960 - DNA, 37 bp, synthetic construct
  misc_feature 1..37: note = Synthetic oligonucleotide
  source 1..37: mol_type = other DNA
tcacagggcctgaaggtagtagatattaaacgctgga

SEQ ID NO: 1961 - DNA, 35 bp, synthetic construct
  misc_feature 1..35: note = Synthetic oligonucleotide
  source 1..35: mol_type = other DNA
tcattatacggatcccgcgccgaacctggccgact

SEQ ID NO: 1962 - DNA, 38 bp, synthetic construct
  misc_feature 1..38: note = Synthetic oligonucleotide
  source 1..38: mol_type = other DNA
tcactttggtaaactattcccccgtttctctcctatga

SEQ ID NO: 1963 - DNA, 37 bp, synthetic construct
  misc_feature 1..37: note = Synthetic oligonucleotide
  source 1..37: mol_type = other DNA
tcaatacgcgtccggaaatccccctgtgcaagctgga

SEQ ID NO: 1964 - DNA, 37 bp, synthetic construct
  misc_feature 1..37: note = Synthetic oligonucleotide
  source 1..37: mol_type = other DNA
tcaatgcttgctgctcgtagctttcaaccgtggtgga

SEQ ID NO: 1965 - DNA, 35 bp, synthetic construct
  misc_feature 1..35: note = Synthetic oligonucleotide
  source 1..35: mol_type = other DNA
tatcgtttgccatattccgccagagaaaagtctcc

SEQ ID NO: 1966 - DNA, 38 bp, synthetic construct
  misc_feature 1..38: note = Synthetic oligonucleotide
  source 1..38: mol_type = other DNA
tcctcgtggcttaccggtatactcccccaactcattga

SEQ ID NO: 1967 - DNA, 37 bp, synthetic construct
  misc_feature 1..37: note = Synthetic oligonucleotide
  source 1..37: mol_type = other DNA
tccctccccgttgcccttattccgtactcacttatga

SEQ ID NO: 1968 - DNA, 38 bp, synthetic construct
  misc_feature 1..38: note = Synthetic oligonucleotide
  source 1..38: mol_type = other DNA
tcctgtctccgctaggtaacatccgaatactctcttga

SEQ ID NO: 1969 - DNA, 36 bp, synthetic construct
  misc_feature 1..36: note = Synthetic oligonucleotide
  source 1..36: mol_type = other DNA
tcctcgaccatctacaaactttgaagccacacccca

SEQ ID NO: 1970 - DNA, 35 bp, synthetic construct; identical to SEQ ID NO: 1551
  misc_feature 1..35: note = Synthetic oligonucleotide
  source 1..35: mol_type = other DNA

SEQ ID NO: 1971 - DNA, 38 bp, synthetic construct
  misc_feature 1..38: note = Synthetic oligonucleotide
  source 1..38: mol_type = other DNA
tccactcaatccccggttcgtatgctctgtaccattga

SEQ ID NO: 1972 - DNA, 38 bp, synthetic construct
  misc_feature 1..38: note = Synthetic oligonucleotide
  source 1..38: mol_type = other DNA
tcccgtcccacctttactttgctacttcaccatcttga

SEQ ID NO: 1973 - DNA, 38 bp, synthetic construct
  misc_feature 1..38: note = Synthetic oligonucleotide
  source 1..38: mol_type = other DNA
tccttgcatacctcggctctcctttctctcacatttga

SEQ ID NO: 1974 - DNA, 37 bp, synthetic construct
  misc_feature 1..37: note = Synthetic oligonucleotide
  source 1..37: mol_type = other DNA
tctcgtgcgcgatttctgttctagggtaggagaggga

SEQ ID NO: 1975 - DNA, 38 bp, synthetic construct
  misc_feature 1..38: note = Synthetic oligonucleotide
  source 1..38: mol_type = other DNA
tcggctcatccaaaattacttgcgggtttcataaatga

SEQ ID NO: 1976 - DNA, 36 bp, synthetic construct
  misc_feature 1..36: note = Synthetic oligonucleotide
  source 1..36: mol_type = other DNA
tctcgcacctttattttctccgctcttttgtttcca

SEQ ID NO: 1977 - DNA, 38 bp, synthetic construct
  misc_feature 1..38: note = Synthetic oligonucleotide
  source 1..38: mol_type = other DNA
tcgctacaattggccttttctgtatttgggttctatga

SEQ ID NO: 1978 - DNA, 37 bp, synthetic construct
  misc_feature 1..37: note = Synthetic oligonucleotide
  source 1..37: mol_type = other DNA
tgcacgccgagcaaggcggtactctaggacccacgga

SEQ ID NO: 1979 - DNA, 38 bp, synthetic construct
  misc_feature 1..38: note = Synthetic oligonucleotide
  source 1..38: mol_type = other DNA
tgccgcttttaccacttgacttacgataagaaaactga

SEQ ID NO: 1980 - DNA, 37 bp, synthetic construct
  misc_feature 1..37: note = Synthetic oligonucleotide
  source 1..37: mol_type = other DNA
tgagtttttctaaataccgcagcctcagccacgcgga

SEQ ID NO: 1981 - DNA, 34 bp, synthetic construct
  misc_feature 1..34: note = Synthetic oligonucleotide
  source 1..34: mol_type = other DNA
tgccttttttttcaccggtttgattccgctttcg

SEQ ID NO: 1982 - DNA, 35 bp, synthetic construct
  misc_feature 1..35: note = Synthetic oligonucleotide
  source 1..35: mol_type = other DNA
tgaaagccaggtattttggggctcctttttcctcc

SEQ ID NO: 1983 - DNA, 38 bp, synthetic construct
  misc_feature 1..38: note = Synthetic oligonucleotide
  source 1..38: mol_type = other DNA
tgacctacaaagggtttgaaataaatcgctcgacgtga

SEQ ID NO: 1984 - DNA, 35 bp, synthetic construct
  misc_feature 1..35: note = Synthetic oligonucleotide
  source 1..35: mol_type = other DNA
tggaaagttagatttcctggggtctcgctttgagt

SEQ ID NO: 1985 - DNA, 35 bp, synthetic construct
  misc_feature 1..35: note = Synthetic oligonucleotide
  source 1..35: mol_type = other DNA
tgtacttacttttactcgatcaccttataatttcc

SEQ ID NO: 1986 - DNA, 38 bp, synthetic construct
  misc_feature 1..38: note = Synthetic oligonucleotide
  source 1..38: mol_type = other DNA
tggcctattctcgtacaatttacttcttatcatcctga

SEQ ID NO: 1987 - DNA, 38 bp, synthetic construct
  misc_feature 1..38: note = Synthetic oligonucleotide
  source 1..38: mol_type = other DNA
ttagtacgtgccgagccccgagccctagagacctgtga

SEQ ID NO: 1988 - DNA, 36 bp, synthetic construct; identical to SEQ ID NO: 1730
  misc_feature 1..36: note = Synthetic oligonucleotide
  source 1..36: mol_type = other DNA

SEQ ID NO: 1989 - DNA, 35 bp, synthetic construct
  misc_feature 1..35: note = Synthetic oligonucleotide
  source 1..35: mol_type = other DNA
tgttagttccactttccgataatccgtcttcctta

SEQ ID NO: 1990 - DNA, 36 bp, synthetic construct
  misc_feature 1..36: note = Synthetic oligonucleotide
  source 1..36: mol_type = other DNA
tgttaggcctttatttaccttatcttaattgtttta

SEQ ID NO: 1991 - DNA, 38 bp, synthetic construct
  misc_feature 1..38: note = Synthetic oligonucleotide
  source 1..38: mol_type = other DNA
tgtttttacacgcctactttttatctatctccacatga

SEQ ID NO: 1992 - DNA, 38 bp, synthetic construct
  misc_feature 1..38: note = Synthetic oligonucleotide
  source 1..38: mol_type = other DNA
ttccccttttatttgcccgtaataatcgcttgacatga

SEQ ID NO: 1993 - DNA, 38 bp, synthetic construct
  misc_feature 1..38: note = Synthetic oligonucleotide
  source 1..38: mol_type = other DNA
ttgaacctcggtagagccgtaaggcctatccggtttga

SEQ ID NO: 1994 - DNA, 37 bp, synthetic construct
  misc_feature 1..37: note = Synthetic oligonucleotide
  source 1..37: mol_type = other DNA
ttcgacccttttccatacttcttctcacgcaaattga

SEQ ID NO: 1995 - DNA, 35 bp, synthetic construct
  misc_feature 1..35: note = Synthetic oligonucleotide
  source 1..35: mol_type = other DNA
ttcttaatgtaaacttttgttgatactgtgccacc

SEQ ID NO: 1996 - DNA, 36 bp, synthetic construct
  misc_feature 1..36: note = Synthetic oligonucleotide
  source 1..36: mol_type = other DNA
ttcccctctactcgcctattttcctcataaaattta

SEQ ID NO: 1997 - DNA, 35 bp, synthetic construct
  misc_feature 1..35: note = Synthetic oligonucleotide
  source 1..35: mol_type = other DNA
ttcctcccccccgtgcaattttagaggtcccgtgg

SEQ ID NO: 1998 - DNA, 35 bp, synthetic construct
  misc_feature 1..35: note = Synthetic oligonucleotide
  source 1..35: mol_type = other DNA
ttctcaccgtacatcccttacctatccccttttat

SEQ ID NO: 1999 - DNA, 38 bp, synthetic construct; identical to SEQ ID NO: 1804
  misc_feature 1..38: note = Synthetic oligonucleotide
  source 1..38: mol_type = other DNA

SEQ ID NO: 2000 - DNA, 36 bp, synthetic construct
  misc_feature 1..36: note = Synthetic oligonucleotide
  source 1..36: mol_type = other DNA
tttgcgaatctagctttcctgtatacatgacaataa

SEQ ID NO: 2001 - DNA, 35 bp, synthetic construct
  misc_feature 1..35: note = Synthetic oligonucleotide
  source 1..35: mol_type = other DNA
ttggtctattatgctctatatgtgaagtgcgaaaa

SEQ ID NO: 2002 - DNA, 35 bp, synthetic construct
  misc_feature 1..35: note = Synthetic oligonucleotide
  source 1..35: mol_type = other DNA
ttttagttccactttccgataatccgccttcctta

SEQ ID NO: 2003 - DNA, 35 bp, synthetic construct
  misc_feature 1..35: note = Synthetic oligonucleotide
  source 1..35: mol_type = other DNA
ttttagtatacccaccgcgatactctcagtcttgc

SEQ ID NO: 2004 - DNA, 38 bp, synthetic construct
  misc_feature 1..38: note = Synthetic oligonucleotide
  source 1..38: mol_type = other DNA
ttttggcgtgagctccaggtagtggttgaaacccatga

SEQ ID NO: 2005 - DNA, 37 bp, synthetic construct
  misc_feature 1..37: note = Synthetic oligonucleotide
  source 1..37: mol_type = other DNA
agttcgccgttggaggctctttcgacatcatgctaga

SEQ ID NO: 2006 - DNA, 36 bp, synthetic construct; identical to SEQ ID NO: 1586
  misc_feature 1..36: note = Synthetic oligonucleotide
  source 1..36: mol_type = other DNA

SEQ ID NO: 2007 - DNA, 35 bp, synthetic construct
  misc_feature 1..35: note = Synthetic oligonucleotide
  source 1..35: mol_type = other DNA
aaagcgatcacgtttctttgggctgctgtctagca

SEQ ID NO: 2008 - DNA, 36 bp, synthetic construct
  misc_feature 1..36: note = Synthetic oligonucleotide
  source 1..36: mol_type = other DNA
ccattaacggtaagacttaattccgtttggcgtgta

SEQ ID NO: 2009 - DNA, 37 bp, synthetic construct; identical to SEQ ID NO: 1587
  misc_feature 1..37: note = Synthetic oligonucleotide
  source 1..37: mol_type = other DNA

SEQ ID NO: 2010 - DNA, 36 bp, synthetic construct
  misc_feature 1..36: note = Synthetic oligonucleotide
  source 1..36: mol_type = other DNA
aatcgtactcacggtgacatccttggtttgatggta

SEQ ID NO: 2011 - DNA, 36 bp, synthetic construct; identical to SEQ ID NO: 1590
  misc_feature 1..36: note = Synthetic oligonucleotide
  source 1..36: mol_type = other DNA

SEQ ID NO: 2012 - DNA, 38 bp, synthetic construct
  misc_feature 1..38: note = Synthetic oligonucleotide
  source 1..38: mol_type = other DNA
gagttttactgccgtgtcaattatcggtcctgtgttga

SEQ ID NO: 2013 - DNA, 38 bp, synthetic construct
  misc_feature 1..38: note = Synthetic oligonucleotide
  source 1..38: mol_type = other DNA
cgggacgaatcttagtttattccattcgcaagtgctga

SEQ ID NO: 2014 - DNA, 35 bp, synthetic construct
  misc_feature 1..35: note = Synthetic oligonucleotide
  source 1..35: mol_type = other DNA
gatcataccgcgatatagacattgcaccgtttcta

SEQ ID NO: 2015 - DNA, 35 bp, synthetic construct; identical to SEQ ID NO: 1591
  misc_feature 1..35: note = Synthetic oligonucleotide
  source 1..35: mol_type = other DNA

SEQ ID NO: 2016 - DNA, 38 bp, synthetic construct
  misc_feature 1..38: note = Synthetic oligonucleotide
  source 1..38: mol_type = other DNA
agggacgaatcttagtttattccattcgcaagtgctga

SEQ ID NO: 2017 - DNA, 38 bp, synthetic construct
  misc_feature 1..38: note = Synthetic oligonucleotide
  source 1..38: mol_type = other DNA
atcgcttaagttccgtaagggttaaggttcgttattga

SEQ ID NO: 2018 - DNA, 35 bp, synthetic construct
  misc_feature 1..35: note = Synthetic oligonucleotide
  source 1..35: mol_type = other DNA
gagtacgcgcaatgacaatcgacttgttttcggtc

SEQ ID NO: 2019 - DNA, 37 bp, synthetic construct; identical to SEQ ID NO: 1595
  misc_feature 1..37: note = Synthetic oligonucleotide
  source 1..37: mol_type = other DNA

SEQ ID NO: 2020 - DNA, 36 bp, synthetic construct
  misc_feature 1..36: note = Synthetic oligonucleotide
  source 1..36: mol_type = other DNA
cctcagtttacgtactcatcttgaatgggggaaata

SEQ ID NO: 2021 - DNA, 38 bp, synthetic construct; identical to SEQ ID NO: 1596
  misc_feature 1..38: note = Synthetic oligonucleotide
  source 1..38: mol_type = other DNA

SEQ ID NO: 2022 - DNA, 35 bp, synthetic construct; identical to SEQ ID NO: 1597
  misc_feature 1..35: note = Synthetic oligonucleotide
  source 1..35: mol_type = other DNA

SEQ ID NO: 2023 - DNA, 38 bp, synthetic construct
  misc_feature 1..38: note = Synthetic oligonucleotide
  source 1..38: mol_type = other DNA
agattaggttgctctgtcccgtgcttaagtatcgctga

SEQ ID NO: 2024 - DNA, 38 bp, synthetic construct
  misc_feature 1..38: note = Synthetic oligonucleotide
  source 1..38: mol_type = other DNA
acattttccgcatgggacggaatgttcttcttcattga

SEQ ID NO: 2025 - DNA, 36 bp, synthetic construct; identical to SEQ ID NO: 1750
  misc_feature 1..36: note = Synthetic oligonucleotide
  source 1..36: mol_type = other DNA

SEQ ID NO: 2026 - DNA, 36 bp, synthetic construct; identical to SEQ ID NO: 1598
  misc_feature 1..36: note = Synthetic oligonucleotide
  source 1..36: mol_type = other DNA

SEQ ID NO: 2027 - DNA, 35 bp, synthetic construct; identical to SEQ ID NO: 1426
  misc_feature 1..35: note = Synthetic oligonucleotide
  source 1..35: mol_type = other DNA

SEQ ID NO: 2028 - DNA, 35 bp, synthetic construct
  misc_feature 1..35: note = Synthetic oligonucleotide
  source 1..35: mol_type = other DNA
tacctcatgtttgtcactatggaaatcatcccgcc

SEQ ID NO: 2029 - DNA, 35 bp, synthetic construct
  misc_feature 1..35: note = Synthetic oligonucleotide
  source 1..35: mol_type = other DNA
tgcttctgcatgcaacgtgctctggactagctgtc

SEQ ID NO: 2030 - DNA, 35 bp, synthetic construct; identical to SEQ ID NO: 1599
  misc_feature 1..35: note = Synthetic oligonucleotide
  source 1..35: mol_type = other DNA

SEQ ID NO: 2031 - DNA, 37 bp, synthetic construct; identical to SEQ ID NO: 1650
  misc_feature 1..37: note = Synthetic oligonucleotide
  source 1..37: mol_type = other DNA

SEQ ID NO: 2032 - DNA, 36 bp, synthetic construct; identical to SEQ ID NO: 1638
  misc_feature 1..36: note = Synthetic oligonucleotide
  source 1..36: mol_type = other DNA

SEQ ID NO: 2033 - DNA, 37 bp, synthetic construct; identical to SEQ ID NO: 1649
  misc_feature 1..37: note = Synthetic oligonucleotide
  source 1..37: mol_type = other DNA

SEQ ID NO: 2034 - DNA, 38 bp, synthetic construct; identical to SEQ ID NO: 1601
  misc_feature 1..38: note = Synthetic oligonucleotide
  source 1..38: mol_type = other DNA

SEQ ID NO: 2035 - DNA, 36 bp, synthetic construct; identical to SEQ ID NO: 1602
  misc_feature 1..36: note = Synthetic oligonucleotide
  source 1..36: mol_type = other DNA

SEQ ID NO: 2036 - DNA, 36 bp, synthetic construct; identical to SEQ ID NO: 1603
  misc_feature 1..36: note = Synthetic oligonucleotide
  source 1..36: mol_type = other DNA

SEQ ID NO: 2037 - DNA, 36 bp, synthetic construct
  misc_feature 1..36: note = Synthetic oligonucleotide
  source 1..36: mol_type = other DNA
ttggcctttgagttagtgcctagatagcctgagtta

SEQ ID NO: 2038 - DNA, 36 bp, synthetic construct
  misc_feature 1..36: note = Synthetic oligonucleotide
  source 1..36: mol_type = other DNA
tcattggttccgatccggggctctggacctgacata

SEQ ID NO: 2039 - DNA, 36 bp, synthetic construct; identical to SEQ ID NO: 1604
  misc_feature 1..36: note = Synthetic oligonucleotide
  source 1..36: mol_type = other DNA

SEQ ID NO: 2040 - DNA, 35 bp, synthetic construct; identical to SEQ ID NO: 1605
  misc_feature 1..35: note = Synthetic oligonucleotide
  source 1..35: mol_type = other DNA

SEQ ID NO: 2041 - DNA, 36 bp, synthetic construct
  misc_feature 1..36: note = Synthetic oligonucleotide
  source 1..36: mol_type = other DNA
gcggagcgcttatataatggtgttgtaggtccatta

SEQ ID NO: 2042 - DNA, 35 bp, synthetic construct
  misc_feature 1..35: note = Synthetic oligonucleotide
  source 1..35: mol_type = other DNA
gtacgccgctgccaataatgtctgttgttacattc

SEQ ID NO: 2043 - DNA, 36 bp, synthetic construct
  misc_feature 1..36: note = Synthetic oligonucleotide
  source 1..36: mol_type = other DNA
tttaatggggagctacgtctcgaatcgattttggta

SEQ ID NO: 2044 - DNA, 35 bp, synthetic construct; identical to SEQ ID NO: 1606
  misc_feature 1..35: note = Synthetic oligonucleotide
  source 1..35: mol_type = other DNA

SEQ ID NO: 2045 - DNA, 35 bp, synthetic construct
  misc_feature 1..35: note = Synthetic oligonucleotide
  source 1..35: mol_type = other DNA
ttcccttgttcgagtttcccagcctggacgccctg

SEQ ID NO: 2046 - DNA, 36 bp, synthetic construct
  misc_feature 1..36: note = Synthetic oligonucleotide
  source 1..36: mol_type = other DNA
tccctgtcggtccaaacgtaagggcgggctaaaaca

SEQ ID NO: 2047 - DNA, 36 bp, synthetic construct
  misc_feature 1..36: note = Synthetic oligonucleotide
  source 1..36: mol_type = other DNA
gtctggctggaaaatcagggttgcctatgtttcaaa

SEQ ID NO: 2048 - DNA, 36 bp, synthetic construct
  misc_feature 1..36: note = Synthetic oligonucleotide
  source 1..36: mol_type = other DNA
tacattccgggctgttcagcaatgtcgctccagtta

SEQ ID NO: 2049 - DNA, 38 bp, synthetic construct; identical to SEQ ID NO: 1609
  misc_feature 1..38: note = Synthetic oligonucleotide
  source 1..38: mol_type = other DNA

SEQ ID NO: 2050 - DNA, 35 bp, synthetic construct
  misc_feature 1..35: note = Synthetic oligonucleotide
  source 1..35: mol_type = other DNA
tttgcaagttcgctccgtatatccactgtgaagac

SEQ ID NO: 2051 - DNA, 35 bp, synthetic construct
  misc_feature 1..35: note = Synthetic oligonucleotide
  source 1..35: mol_type = other DNA
tttgcaagttcgctccgtatatccactgtgaagcc

SEQ ID NO: 2052 - DNA, 36 bp, synthetic construct
  misc_feature 1..36: note = Synthetic oligonucleotide
  source 1..36: mol_type = other DNA
tcctctccgtctgtgaagacgtgtgtggcggaatta

SEQ ID NO: 2053 - DNA, 35 bp, synthetic construct; identical to SEQ ID NO: 1644
  misc_feature 1..35: note = Synthetic oligonucleotide
  source 1..35: mol_type = other DNA

SEQ ID NO: 2054 - DNA, 36 bp, synthetic construct; identical to SEQ ID NO: 1611
  misc_feature 1..36: note = Synthetic oligonucleotide
  source 1..36: mol_type = other DNA

SEQ ID NO: 2055 - DNA, 37 bp, synthetic construct
  misc_feature 1..37: note = Synthetic oligonucleotide
  source 1..37: mol_type = other DNA
aaccaaacctgtacccgaataaatcatccattaacga

SEQ ID NO: 2056 - DNA, 36 bp, synthetic construct
  misc_feature 1..36: note = Synthetic oligonucleotide
  source 1..36: mol_type = other DNA
aacccaattcacatactctctcaccctcactaaaca

SEQ ID NO: 2057 - DNA, 37 bp, synthetic construct
  misc_feature 1..37: note = Synthetic oligonucleotide
  source 1..37: mol_type = other DNA
aacaacctcgaatttgtataggttcgcatcactctga

SEQ ID NO: 2058 - DNA, 35 bp, synthetic construct
  misc_feature 1..35: note = Synthetic oligonucleotide
  source 1..35: mol_type = other DNA
aactgtcatccgctgactaactcaatctaactcca

SEQ ID NO: 2059 - DNA, 38 bp, synthetic construct
  misc_feature 1..38: note = Synthetic oligonucleotide
  source 1..38: mol_type = other DNA
acattaaggatttatcttcacccatttttgcctcttga

SEQ ID NO: 2060 - DNA, 38 bp, synthetic construct
  misc_feature 1..38: note = Synthetic oligonucleotide
  source 1..38: mol_type = other DNA
acaaagtaacgtacctcagttccggtacttacgggtga

SEQ ID NO: 2061 - DNA, 35 bp, synthetic construct
  misc_feature 1..35: note = Synthetic oligonucleotide
  source 1..35: mol_type = other DNA
accccacctgcacaccttcatctcatctattacat

SEQ ID NO: 2062 - DNA, 38 bp, synthetic construct; identical to SEQ ID NO: 2024
  misc_feature 1..38: note = Synthetic oligonucleotide
  source 1..38: mol_type = other DNA

SEQ ID NO: 2063 - DNA, 37 bp, synthetic construct
  misc_feature 1..37: note = Synthetic oligonucleotide
  source 1..37: mol_type = other DNA
acaattaatataaattccttacatcaatcctagacga

SEQ ID NO: 2064 - DNA, 38 bp, synthetic construct
  misc_feature 1..38: note = Synthetic oligonucleotide
  source 1..38: mol_type = other DNA
acattcccgtggtggtccttacgggtgggccagcctga

SEQ ID NO: 2065 - DNA, 38 bp, synthetic construct; identical to SEQ ID NO: 1612
  misc_feature 1..38: note = Synthetic oligonucleotide
  source 1..38: mol_type = other DNA

SEQ ID NO: 2066 - DNA, 35 bp, synthetic construct
  misc_feature 1..35: note = Synthetic oligonucleotide
  source 1..35: mol_type = other DNA
accggactgcacagggatcccgataggagggtgac

SEQ ID NO: 2067 - DNA, 37 bp, synthetic construct
  misc_feature 1..37: note = Synthetic oligonucleotide
  source 1..37: mol_type = other DNA
acccttgcaatcaatccccccttttacctgtacatga

SEQ ID NO: 2068 - DNA, 36 bp, synthetic construct
  misc_feature 1..36: note = Synthetic oligonucleotide
  source 1..36: mol_type = other DNA
actcgcccttcacgactttatccaaatttactttca

SEQ ID NO: 2069 - DNA, 35 bp, synthetic construct
  misc_feature 1..35: note = Synthetic oligonucleotide
  source 1..35: mol_type = other DNA
acgtctgccaaatctactcgcattcgatacacaca

SEQ ID NO: 2070 - DNA, 35 bp, synthetic construct
  misc_feature 1..35: note = Synthetic oligonucleotide
  source 1..35: mol_type = other DNA
actactgggcgcactagcgcgaggctccactgaat

SEQ ID NO: 2071 - DNA, 38 bp, synthetic construct
  misc_feature 1..38: note = Synthetic oligonucleotide
  source 1..38: mol_type = other DNA
actcacattcccaccccctattgcctttaaatacctga

SEQ ID NO: 2072 - DNA, 37 bp, synthetic construct
  misc_feature 1..37: note = Synthetic oligonucleotide
  source 1..37: mol_type = other DNA
actgcagcatcaagccactaattggggcttgtatcga

SEQ ID NO: 2073 - DNA, 37 bp, synthetic construct
  misc_feature 1..37: note = Synthetic oligonucleotide
  source 1..37: mol_type = other DNA
acggttggagcttgtgggaaactaggttgggttcgga

SEQ ID NO: 2074 - DNA, 35 bp, synthetic construct; identical to SEQ ID NO: 1597
  misc_feature 1..35: note = Synthetic oligonucleotide
  source 1..35: mol_type = other DNA

SEQ ID NO: 2075 - DNA, 35 bp, synthetic construct
  misc_feature 1..35: note = Synthetic oligonucleotide
  source 1..35: mol_type = other DNA
agcacccacccgcttctattcctcgatcatacact

SEQ ID NO: 2076 - DNA, 35 bp, synthetic construct; identical to SEQ ID NO: 1591
  misc_feature 1..35: note = Synthetic oligonucleotide
  source 1..35: mol_type = other DNA

SEQ ID NO: 2077 - DNA, 36 bp, synthetic construct; identical to SEQ ID NO: 1590
  misc_feature 1..36: note = Synthetic oligonucleotide
  source 1..36: mol_type = other DNA

SEQ ID NO: 2078 - DNA, 35 bp, synthetic construct
  misc_feature 1..35: note = Synthetic oligonucleotide
  source 1..35: mol_type = other DNA
agattgctccgcagtacggtgtagggcgataaaaa

SEQ ID NO: 2079 - DNA, 35 bp, synthetic construct
  misc_feature 1..35: note = Synthetic oligonucleotide
  source 1..35: mol_type = other DNA
agccgcccctttagacagaggttacgacttgcgta

SEQ ID NO: 2080 - DNA, 38 bp, synthetic construct
  misc_feature 1..38: note = Synthetic oligonucleotide
  source 1..38: mol_type = other DNA
actttggggctttctcggtcttcgcactatggtactga

SEQ ID NO: 2081 - DNA, 36 bp, synthetic construct; identical to SEQ ID NO: 1617
  misc_feature 1..36: note = Synthetic oligonucleotide
  source 1..36: mol_type = other DNA

SEQ ID NO: 2082 - DNA, 36 bp, synthetic construct
  misc_feature 1..36: note = Synthetic oligonucleotide
  source 1..36: mol_type = other DNA
agaaccccattctcattccaccagttactacgctta

SEQ ID NO: 2083 - DNA, 36 bp, synthetic construct
  misc_feature 1..36: note = Synthetic oligonucleotide
  source 1..36: mol_type = other DNA
aggtatacaaatgtgtagtctagtcctgccgatcga

SEQ ID NO: 2084 - DNA, 36 bp, synthetic construct; identical to SEQ ID NO: 1586
  misc_feature 1..36: note = Synthetic oligonucleotide
  source 1..36: mol_type = other DNA

SEQ ID NO: 2085 - DNA, 36 bp, synthetic construct
  misc_feature 1..36: note = Synthetic oligonucleotide
  source 1..36: mol_type = other DNA
agggattcgccctgtgtcacgctcaaactgtagtaa

SEQ ID NO: 2086 - DNA, 38 bp, synthetic construct
  misc_feature 1..38: note = Synthetic oligonucleotide
  source 1..38: mol_type = other DNA
agtaatccccggcgtataatttcagtcctgtggtttga

SEQ ID NO: 2087 - DNA, 35 bp, synthetic construct
  misc_feature 1..35: note = Synthetic oligonucleotide
  source 1..35: mol_type = other DNA
agttgatgcagtgggacctgagattaggcttatga

SEQ ID NO: 2088 - DNA, 36 bp, synthetic construct
  misc_feature 1..36: note = Synthetic oligonucleotide
  source 1..36: mol_type = other DNA
agtattcctctggtagtatttttccttaattccgta

SEQ ID NO: 2089 - DNA, 35 bp, synthetic construct; identical to SEQ ID NO: 1620
  misc_feature 1..35: note = Synthetic oligonucleotide
  source 1..35: mol_type = other DNA

SEQ ID NO: 2090 - DNA, 35 bp, synthetic construct
  misc_feature 1..35: note = Synthetic oligonucleotide
  source 1..35: mol_type = other DNA
agtacctcttgtgggtcttggggctgccactgcct

SEQ ID NO: 2091 - DNA, 36 bp, synthetic construct
  misc_feature 1..36: note = Synthetic oligonucleotide
  source 1..36: mol_type = other DNA
atcaccgtccttatcataaccagttcgttttttata

SEQ ID NO: 2092 - DNA, 36 bp, synthetic construct
  misc_feature 1..36: note = Synthetic oligonucleotide
  source 1..36: mol_type = other DNA
atgcttccatctctgttttttaaccccttaccgtta

SEQ ID NO: 2093 - DNA, 35 bp, synthetic construct; identical to SEQ ID NO: 1594
  misc_feature 1..35: note = Synthetic oligonucleotide
  source 1..35: mol_type = other DNA

SEQ ID NO: 2094 - DNA, 37 bp, synthetic construct
  misc_feature 1..37: note = Synthetic oligonucleotide
  source 1..37: mol_type = other DNA
caccctaatcaccgctaaccttaccataacaatttga

SEQ ID NO: 2095 - DNA, 37 bp, synthetic construct
  misc_feature 1..37: note = Synthetic oligonucleotide
  source 1..37: mol_type = other DNA
cagccgctctagttacaggtttactgcggctaaacga

SEQ ID NO: 2096 - DNA, 35 bp, synthetic construct
  misc_feature 1..35: note = Synthetic oligonucleotide
  source 1..35: mol_type = other DNA
cacagtatccttgtacagattttgatggttgttgg

SEQ ID NO: 2097 - DNA, 35 bp, synthetic construct
  misc_feature 1..35: note = Synthetic oligonucleotide
  source 1..35: mol_type = other DNA
catcggggtacgcttcctttaaaagatcctgtgcc

SEQ ID NO: 2098 - DNA, 36 bp, synthetic construct
  misc_feature 1..36: note = Synthetic oligonucleotide
  source 1..36: mol_type = other DNA
attcatggtgccgtgagaaaataaccatgtacgcaa

SEQ ID NO: 2099 - DNA, 35 bp, synthetic construct
  misc_feature 1..35: note = Synthetic oligonucleotide
  source 1..35: mol_type = other DNA
atttccataccattgtaggccttctcgtatcgtaa

SEQ ID NO: 2100 - DNA, 38 bp, synthetic construct
  misc_feature 1..38: note = Synthetic oligonucleotide
  source 1..38: mol_type = other DNA
cccatagggcactttttacacccctcgcatactattga

SEQ ID NO: 2101 - DNA, 37 bp, synthetic construct
  misc_feature 1..37: note = Synthetic oligonucleotide
  source 1..37: mol_type = other DNA
ccgtgatgcagatgaatgtacggacgtctgccggtga

SEQ ID NO: 2102 - DNA, 38 bp, synthetic construct
  misc_feature 1..38: note = Synthetic oligonucleotide
  source 1..38: mol_type = other DNA
cccaccgagggcaggtggtgacgtttccccagccttga

SEQ ID NO: 2103 - DNA, 38 bp, synthetic construct
  misc_feature 1..38: note = Synthetic oligonucleotide
  source 1..38: mol_type = other DNA
cccagacaactaccgcggagtagcggaagccgtactga

SEQ ID NO: 2104 - DNA, 36 bp, synthetic construct
  misc_feature 1..36: note = Synthetic oligonucleotide
  source 1..36: mol_type = other DNA
ccgcgcatcacattgggctctgggatgcccgctgca

SEQ ID NO: 2105 - DNA, 35 bp, synthetic construct
  misc_feature 1..35: note = Synthetic oligonucleotide
  source 1..35: mol_type = other DNA
cctagaccacgtgtgtgtcccgggtagggaagtct

SEQ ID NO: 2106 - DNA, 37 bp, synthetic construct; identical to SEQ ID NO: 1587
  misc_feature 1..37: note = Synthetic oligonucleotide
  source 1..37: mol_type = other DNA

SEQ ID NO: 2107 - DNA, 36 bp, synthetic construct; identical to SEQ ID NO: 2008
  misc_feature 1..36: note = Synthetic oligonucleotide
  source 1..36: mol_type = other DNA

SEQ ID NO: 2108 - DNA, 37 bp, synthetic construct
  misc_feature 1..37: note = Synthetic oligonucleotide
  source 1..37: mol_type = other DNA
ccccaccgcgcacaccccgaactttacatatgcatga

SEQ ID NO: 2109 - DNA, 38 bp, synthetic construct
  misc_feature 1..38: note = Synthetic oligonucleotide
  source 1..38: mol_type = other DNA
ccacacccattttgactgaacagcctatccggtactga

SEQ ID NO: 2110 - DNA, 36 bp, synthetic construct
  misc_feature 1..36: note = Synthetic oligonucleotide
  source 1..36: mol_type = other DNA
cctgttcaattcatcctccaggttcgtgttacccta

SEQ ID NO: 2111 - DNA, 36 bp, synthetic construct
  misc_feature 1..36: note = Synthetic oligonucleotide
  source 1..36: mol_type = other DNA
cctttcggactagcttctggcccatttggcgccata

SEQ ID NO: 2112 - DNA, 35 bp, synthetic construct
  misc_feature 1..35: note = Synthetic oligonucleotide
  source 1..35: mol_type = other DNA
ctacaattagaagctcggtttcttctgcggtgacg

SEQ ID NO: 2113 - DNA, 38 bp, synthetic construct; identical to SEQ ID NO: 1596
  misc_feature 1..38: note = Synthetic oligonucleotide
  source 1..38: mol_type = other DNA

SEQ ID NO: 2114 - DNA, 35 bp, synthetic construct
  misc_feature 1..35: note = Synthetic oligonucleotide
  source 1..35: mol_type = other DNA
cgcgggggcctatatgctgtttccaccgctagtta

SEQ ID NO: 2115 - DNA, 35 bp, synthetic construct
  misc_feature 1..35: note = Synthetic oligonucleotide
  source 1..35: mol_type = other DNA
cgctggctgcacgcacgcctgggcgcactgcccta

SEQ ID NO: 2116 - DNA, 35 bp, synthetic construct
  misc_feature 1..35: note = Synthetic oligonucleotide
  source 1..35: mol_type = other DNA
cgtataggttaatacgtactggagcccggagggga

SEQ ID NO: 2117 - DNA, 37 bp, synthetic construct
  misc_feature 1..37: note = Synthetic oligonucleotide
  source 1..37: mol_type = other DNA
cctgaatgggcggtccgcacttcgttagtatcccaga

SEQ ID NO: 2118 - DNA, 35 bp, synthetic construct
  misc_feature 1..35: note = Synthetic oligonucleotide
  source 1..35: mol_type = other DNA
ctcaacgtagtctgcggagttactccagaatgacg

SEQ ID NO: 2119 - DNA, 38 bp, synthetic construct
  misc_feature 1..38: note = Synthetic oligonucleotide
  source 1..38: mol_type = other DNA
gaacttcgcggtgactcgtgcccttcgttgtcctttga

SEQ ID NO: 2120 - DNA, 35 bp, synthetic construct
  misc_feature 1..35: note = Synthetic oligonucleotide
  source 1..35: mol_type = other DNA
gaaccatcattggcttcatttagctattctacacc

SEQ ID NO: 2121 - DNA, 38 bp, synthetic construct
  misc_feature 1..38: note = Synthetic oligonucleotide
  source 1..38: mol_type = other DNA
ctgtccttaaatggaaggtcattttggctcaggtctga

SEQ ID NO: 2122 - DNA, 37 bp, synthetic construct
  misc_feature 1..37: note = Synthetic oligonucleotide
  source 1..37: mol_type = other DNA
gacacgggggcaaaggtggtttgtgtaccccgtacga

SEQ ID NO: 2123 - DNA, 37 bp, synthetic construct
  misc_feature 1..37: note = Synthetic oligonucleotide
  source 1..37: mol_type = other DNA
gaaggtcatcggactgttctgtcaatccccctttgga

SEQ ID NO: 2124 - DNA, 35 bp, synthetic construct
  misc_feature 1..35: note = Synthetic oligonucleotide
  source 1..35: mol_type = other DNA
gagctcaaatcggggactactgcattgtctactcg

SEQ ID NO: 2125 - DNA, 37 bp, synthetic construct; identical to SEQ ID NO: 1595
  misc_feature 1..37: note = Synthetic oligonucleotide
  source 1..37: mol_type = other DNA

SEQ ID NO: 2126 - DNA, 38 bp, synthetic construct
  misc_feature 1..38: note = Synthetic oligonucleotide
  source 1..38: mol_type = other DNA
gacgccttgaaagcgacgcctgatactcgggggcctga

SEQ ID NO: 2127 - DNA, 37 bp, synthetic construct
  misc_feature 1..37: note = Synthetic oligonucleotide
  source 1..37: mol_type = other DNA
gagggccccaagtcaccgctgtagttctaggcccaga

SEQ ID NO: 2128 - DNA, 35 bp, synthetic construct
  misc_feature 1..35: note = Synthetic oligonucleotide
  source 1..35: mol_type = other DNA
gacggtcgtactggagcatcctgagactgttcgag

SEQ ID NO: 2129 - DNA, 37 bp, synthetic construct; identical to SEQ ID NO: 1767
  misc_feature 1..37: note = Synthetic oligonucleotide
  source 1..37: mol_type = other DNA

SEQ ID NO: 2130 - DNA, 35 bp, synthetic construct
  misc_feature 1..35: note = Synthetic oligonucleotide
  source 1..35: mol_type = other DNA
gagtacaggtccggcgccctatcgagaaaggaaaa

SEQ ID NO: 2131 - DNA, 38 bp, synthetic construct
  misc_feature 1..38: note = Synthetic oligonucleotide
  source 1..38: mol_type = other DNA
gagtactgccatgaggccagaggtaagaagccgaatga

SEQ ID NO: 2132 - DNA, 35 bp, synthetic construct
  misc_feature 1..35: note = Synthetic oligonucleotide
  source 1..35: mol_type = other DNA
gagtacagttggattccgcccttgtatctgtacga

SEQ ID NO: 2133 - DNA, 37 bp, synthetic construct
  misc_feature 1..37: note = Synthetic oligonucleotide
  source 1..37: mol_type = other DNA
gagtacctacccgtcgaatattgagattcgggaacga

SEQ ID NO: 2134 - DNA, 35 bp, synthetic construct
  misc_feature 1..35: note = Synthetic oligonucleotide
  source 1..35: mol_type = other DNA
gagtctcatacccctgaatatgtttttatgctttc

SEQ ID NO: 2135 - DNA, 36 bp, synthetic construct
  misc_feature 1..36: note = Synthetic oligonucleotide
  source 1..36: mol_type = other DNA
gagtggctcaaccagggtccagaattacaaaaaata

SEQ ID NO: 2136 - DNA, 36 bp, synthetic construct
  misc_feature 1..36: note = Synthetic oligonucleotide
  source 1..36: mol_type = other DNA
gcaatgtcccctgttttctactaactctgatcttga

SEQ ID NO: 2137 - DNA, 36 bp, synthetic construct
  misc_feature 1..36: note = Synthetic oligonucleotide
  source 1..36: mol_type = other DNA
gcagttctaaaggtggaagaatccaaatgacccaga

SEQ ID NO: 2138 - DNA, 35 bp, synthetic construct
  misc_feature 1..35: note = Synthetic oligonucleotide
  source 1..35: mol_type = other DNA
gcaccttctcctttaattcccagccaataaccatc

SEQ ID NO: 2139 - DNA, 36 bp, synthetic construct
  misc_feature 1..36: note = Synthetic oligonucleotide
  source 1..36: mol_type = other DNA
gatgtaacgggtctgcggggagtttgtcatgcggga

SEQ ID NO: 2140 - DNA, 35 bp, synthetic construct
  misc_feature 1..35: note = Synthetic oligonucleotide
  source 1..35: mol_type = other DNA
gccatcatattcattattccatgcctccccatccc

SEQ ID NO: 2141 - DNA, 35 bp, synthetic construct; identical to SEQ ID NO: 2014
  misc_feature 1..35: note = Synthetic oligonucleotide
  source 1..35: mol_type = other DNA

SEQ ID NO: 2142 - DNA, 36 bp, synthetic construct
  misc_feature 1..36: note = Synthetic oligonucleotide
  source 1..36: mol_type = other DNA
gcaatgaacacctacacatacctgccttcacgatta

SEQ ID NO: 2143 - DNA, 36 bp, synthetic construct
  misc_feature 1..36: note = Synthetic oligonucleotide
  source 1..36: mol_type = other DNA
gccctcacttcaacgtttcataactctacattaata

SEQ ID NO: 2144 - DNA, 38 bp, synthetic construct
  misc_feature 1..38: note = Synthetic oligonucleotide
  source 1..38: mol_type = other DNA
gcgccgatggggcatcggtcgcgacagtcccgccgtga

SEQ ID NO: 2145 - DNA, 36 bp, synthetic construct
  misc_feature 1..36: note = Synthetic oligonucleotide
  source 1..36: mol_type = other DNA
gcgttccccttggacaatatcactttcttatcgtaa

SEQ ID NO: 2146 - DNA, 35 bp, synthetic construct; identical to SEQ ID NO: 1600
  misc_feature 1..35: note = Synthetic oligonucleotide
  source 1..35: mol_type = other DNA

SEQ ID NO: 2147 - DNA, 36 bp, synthetic construct
  misc_feature 1..36: note = Synthetic oligonucleotide
  source 1..36: mol_type = other DNA
gcctctgccaagcaattcatcttaacgacctctcta

SEQ ID NO: 2148 - DNA, 35 bp, synthetic construct
  misc_feature 1..35: note = Synthetic oligonucleotide
  source 1..35: mol_type = other DNA
gccgccggagcacggctgtctttatacgcactgta

SEQ ID NO: 2149 - DNA, 36 bp, synthetic construct; identical to SEQ ID NO: 2041
  misc_feature 1..36: note = Synthetic oligonucleotide
  source 1..36: mol_type = other DNA

SEQ ID NO: 2150 - DNA, 38 bp, synthetic construct
  misc_feature 1..38: note = Synthetic oligonucleotide
  source 1..38: mol_type = other DNA
gcgtacatagatctaggctttccatccaggatatgtga

SEQ ID NO: 2151 - DNA, 36 bp, synthetic construct
  misc_feature 1..36: note = Synthetic oligonucleotide
  source 1..36: mol_type = other DNA
gcgccggcatactccttatattccactatccctgta

SEQ ID NO: 2152 - DNA, 38 bp, synthetic construct
  misc_feature 1..38: note = Synthetic oligonucleotide
  source 1..38: mol_type = other DNA
gctaacgtactctttttttcaacttcactgactattga

SEQ ID NO: 2153 - DNA, 38 bp, synthetic construct
  misc_feature 1..38: note = Synthetic oligonucleotide
  source 1..38: mol_type = other DNA
gctcccgaattgttttcctattaatcgttttcccatga

SEQ ID NO: 2154 - DNA, 36 bp, synthetic construct
  misc_feature 1..36: note = Synthetic oligonucleotide
  source 1..36: mol_type = other DNA
gctgaacaggtcacggtcccccccacacgttaacta

SEQ ID NO: 2155 - DNA, 37 bp, synthetic construct
  misc_feature 1..37: note = Synthetic oligonucleotide
  source 1..37: mol_type = other DNA
gctatacgactgcaagggtctgaccgcagggaattga

SEQ ID NO: 2156 - DNA, 36 bp, synthetic construct
  misc_feature 1..36: note = Synthetic oligonucleotide
  source 1..36: mol_type = other DNA
gcttccgtatcaagagtggctcgcacccacagagta

SEQ ID NO: 2157 - DNA, 35 bp, synthetic construct
  misc_feature 1..35: note = Synthetic oligonucleotide
  source 1..35: mol_type = other DNA
ggattacgtacccgactttttttctggttttcttt

SEQ ID NO: 2158 - DNA, 36 bp, synthetic construct
  misc_feature 1..36: note = Synthetic oligonucleotide
  source 1..36: mol_type = other DNA
gggaccggaccctgtccttggtcgtttgatccacga

SEQ ID NO: 2159 - DNA, 38 bp, synthetic construct
  misc_feature 1..38: note = Synthetic oligonucleotide
  source 1..38: mol_type = other DNA
ggtatttttttgtgctaatctcgccgaatcgtacctga

SEQ ID NO: 2160 - DNA, 36 bp, synthetic construct
  misc_feature 1..36: note = Synthetic oligonucleotide
  source 1..36: mol_type = other DNA
ggctcaccgactccttactttgctggtactacctta

SEQ ID NO: 2161 - DNA, 37 bp, synthetic construct
  misc_feature 1..37: note = Synthetic oligonucleotide
  source 1..37: mol_type = other DNA
gggaacgtaaggttttggtgaacagagggtagtaaga

SEQ ID NO: 2162 - DNA, 38 bp, synthetic construct
  misc_feature 1..38: note = Synthetic oligonucleotide
  source 1..38: mol_type = other DNA
ggtgcttgtccctgtctctacgtaacttttgaagttga

SEQ ID NO: 2163 - DNA, 38 bp, synthetic construct; identical to SEQ ID NO: 1601
  misc_feature 1..38: note = Synthetic oligonucleotide
  source 1..38: mol_type = other DNA

SEQ ID NO: 2164 - DNA, 35 bp, synthetic construct
  misc_feature 1..35: note = Synthetic oligonucleotide
  source 1..35: mol_type = other DNA
ggggtccttttccatcacacatgtccagttccgta

SEQ ID NO: 2165 - DNA, 35 bp, synthetic construct
  misc_feature 1..35: note = Synthetic oligonucleotide
  source 1..35: mol_type = other DNA
ggccttcttaccgactggggcttcgggttttacgt

SEQ ID NO: 2166 - DNA, 37 bp, synthetic construct
  misc_feature 1..37: note = Synthetic oligonucleotide
  source 1..37: mol_type = other DNA
gtgggcccgcattgaaaccgcattcgtagagcctgga

SEQ ID NO: 2167 - DNA, 35 bp, synthetic construct; identical to SEQ ID NO: 2042
  misc_feature 1..35: note = Synthetic oligonucleotide
  source 1..35: mol_type = other DNA

SEQ ID NO: 2168 - DNA, 37 bp, synthetic construct
  misc_feature 1..37: note = Synthetic oligonucleotide
  source 1..37: mol_type = other DNA
gtacttgccgggttacgcagcgcgtccctcttcgcga

SEQ ID NO: 2169 - DNA, 37 bp, synthetic construct
  misc_feature 1..37: note = Synthetic oligonucleotide
  source 1..37: mol_type = other DNA
gtgagctttacgtaatgcggtagttcgtactaacgga

SEQ ID NO: 2170 - DNA, 36 bp, synthetic construct; identical to SEQ ID NO: 1598
  misc_feature 1..36: note = Synthetic oligonucleotide
  source 1..36: mol_type = other DNA

SEQ ID NO: 2171 - DNA, 38 bp, synthetic construct
  misc_feature 1..38: note = Synthetic oligonucleotide
  source 1..38: mol_type = other DNA
gtcgcctatcccagtgcttcgaggggcgacgtgtctga

SEQ ID NO: 2172 - DNA, 37 bp, synthetic construct
  misc_feature 1..37: note = Synthetic oligonucleotide
  source 1..37: mol_type = other DNA
gtgtacatttccgcgcaagctactcagttttttttga

SEQ ID NO: 2173 - DNA, 35 bp, synthetic construct
  misc_feature 1..35: note = Synthetic oligonucleotide
  source 1..35: mol_type = other DNA
gtttactcctgtaccgtgaggtgaagggaaagcaa

SEQ ID NO: 2174 - DNA, 36 bp, synthetic construct; identical to SEQ ID NO: 2048
  misc_feature 1..36: note = Synthetic oligonucleotide
  source 1..36: mol_type = other DNA

SEQ ID NO: 2175 - DNA, 37 bp, synthetic construct
  misc_feature 1..37: note = Synthetic oligonucleotide
  source 1..37: mol_type = other DNA
gttttttactatggttcatctaggattccagtttaga

SEQ ID NO: 2176 - DNA, 36 bp, synthetic construct
  misc_feature 1..36: note = Synthetic oligonucleotide
  source 1..36: mol_type = other DNA
gttctttcacggacggcctcctttccgatctattca

SEQ ID NO: 2177 - DNA, 36 bp, synthetic construct; identical to SEQ ID NO: 1602
  misc_feature 1..36: note = Synthetic oligonucleotide
  source 1..36: mol_type = other DNA

SEQ ID NO: 2178 - DNA, 37 bp, synthetic construct
  misc_feature 1..37: note = Synthetic oligonucleotide
  source 1..37: mol_type = other DNA
gttccgggctctttgtgtagtggtgagcacggcacga

SEQ ID NO: 2179 - DNA, 37 bp, synthetic construct
  misc_feature 1..37: note = Synthetic oligonucleotide
  source 1..37: mol_type = other DNA
taaatgcccggttcattgaatcttcacaaagatggga

SEQ ID NO: 2180 - DNA, 36 bp, synthetic construct; identical to SEQ ID NO: 1603
  misc_feature 1..36: note = Synthetic oligonucleotide
  source 1..36: mol_type = other DNA

SEQ ID NO: 2181 - DNA, 38 bp, synthetic construct
  misc_feature 1..38: note = Synthetic oligonucleotide
  source 1..38: mol_type = other DNA
tacaccatgatacttacatctagcaaccttttttttga

SEQ ID NO: 2182 - DNA, 35 bp, synthetic construct
  misc_feature 1..35: note = Synthetic oligonucleotide
  source 1..35: mol_type = other DNA
taaccgttcgctgggttccagtcccttgttaagcc

SEQ ID NO: 2183 - DNA, 36 bp, synthetic construct
  misc_feature 1..36: note = Synthetic oligonucleotide
  source 1..36: mol_type = other DNA
tagtgttaaacgtgagtgcacttaatcaccctggta

SEQ ID NO: 2184 - DNA, 36 bp, synthetic construct
  misc_feature 1..36: note = Synthetic oligonucleotide
  source 1..36: mol_type = other DNA
taccttgacctgcatcggttctcttcataatcctaa

SEQ ID NO: 2185 - DNA, 38 bp, synthetic construct
  misc_feature 1..38: note = Synthetic oligonucleotide
  source 1..38: mol_type = other DNA
tagtcctgcactgttttacagttcttggtaatatttga

SEQ ID NO: 2186 - DNA, 35 bp, synthetic construct
  misc_feature 1..35: note = Synthetic oligonucleotide
  source 1..35: mol_type = other DNA
tacttcaacacctcgctcgttacataccaatttct

SEQ ID NO: 2187 - DNA, 36 bp, synthetic construct; identical to SEQ ID NO: 1638
  misc_feature 1..36: note = Synthetic oligonucleotide
  source 1..36: mol_type = other DNA

SEQ ID NO: 2188 - DNA, 35 bp, synthetic construct
  misc_feature 1..35: note = Synthetic oligonucleotide
  source 1..35: mol_type = other DNA
tcatcgtcgcgtggccggtaggctgggaaatcctg

SEQ ID NO: 2189 - DNA, 37 bp, synthetic construct
  misc_feature 1..37: note = Synthetic oligonucleotide
  source 1..37: mol_type = other DNA
tcacggatgcgaatcaaatgaactacctaagtccgga

SEQ ID NO: 2190 - DNA, 36 bp, synthetic construct; identical to SEQ ID NO: 2038
  misc_feature 1..36: note = Synthetic oligonucleotide
  source 1..36: mol_type = other DNA

SEQ ID NO: 2191 - DNA, 35 bp, synthetic construct; identical to SEQ ID NO: 1777
  misc_feature 1..35: note = Synthetic oligonucleotide
  source 1..35: mol_type = other DNA

SEQ ID NO: 2192 - DNA, 37 bp, synthetic construct
  misc_feature 1..37: note = Synthetic oligonucleotide
  source 1..37: mol_type = other DNA
tccagccacatggatgaacagtgggccttttcacgga

SEQ ID NO: 2193 - DNA, 37 bp, synthetic construct; identical to SEQ ID NO: 1639
  misc_feature 1..37: note = Synthetic oligonucleotide
  source 1..37: mol_type = other DNA

SEQ ID NO: 2194 - DNA, 38 bp, synthetic construct
  misc_feature 1..38: note = Synthetic oligonucleotide
  source 1..38: mol_type = other DNA
tccttccgacgataacttacgtgtgacacgcgtactga

SEQ ID NO: 2195 - DNA, 38 bp, synthetic construct; identical to SEQ ID NO: 1608
  misc_feature 1..38: note = Synthetic oligonucleotide
  source 1..38: mol_type = other DNA

SEQ ID NO: 2196 - DNA, 38 bp, synthetic construct
  misc_feature 1..38: note = Synthetic oligonucleotide
  source 1..38: mol_type = other DNA
tcccgagtttgtcgatctcgagtggggcccttacctga

SEQ ID NO: 2197 - DNA, 36 bp, synthetic construct
  misc_feature 1..36: note = Synthetic oligonucleotide
  source 1..36: mol_type = other DNA
tccctgtaacagggtctctctctttatatattctca

SEQ ID NO: 2198 - DNA, 37 bp, synthetic construct
  misc_feature 1..37: note = Synthetic oligonucleotide
  source 1..37: mol_type = other DNA
tcgttcctcctttcgggtccgtgaggatccggaacga

SEQ ID NO: 2199 - DNA, 36 bp, synthetic construct; identical to SEQ ID NO: 1604
  misc_feature 1..36: note = Synthetic oligonucleotide
  source 1..36: mol_type = other DNA

SEQ ID NO: 2200 - DNA, 37 bp, synthetic construct
  misc_feature 1..37: note = Synthetic oligonucleotide
  source 1..37: mol_type = other DNA
tctcctttccaacgggacgctgtgttcccctcagtga

SEQ ID NO: 2201 - DNA, 35 bp, synthetic construct
  misc_feature 1..35: note = Synthetic oligonucleotide
  source 1..35: mol_type = other DNA
tctgcactaccgtgaggtatggtgataggtggcga

SEQ ID NO: 2202 - DNA, 36 bp, synthetic construct
  misc_feature 1..36: note = Synthetic oligonucleotide
  source 1..36: mol_type = other DNA
tcgggccagatcgcattcgtagttgctgtttccgta

SEQ ID NO: 2203 - DNA, 37 bp, synthetic construct
  misc_feature 1..37: note = Synthetic oligonucleotide
  source 1..37: mol_type = other DNA
tgcacttaattccacttttccacccttttcactttga

SEQ ID NO: 2204 - DNA, 37 bp, synthetic construct
  misc_feature 1..37: note = Synthetic oligonucleotide
  source 1..37: mol_type = other DNA
tgcacataattccacctttccacccttttcactttga

SEQ ID NO: 2205 - DNA, 38 bp, synthetic construct
  misc_feature 1..38: note = Synthetic oligonucleotide
  source 1..38: mol_type = other DNA
tgagcatcttcacacgcatggctccacctcataaatga

SEQ ID NO: 2206 - DNA, 36 bp, synthetic construct; identical to SEQ ID NO: 1750
  misc_feature 1..36: note = Synthetic oligonucleotide
  source 1..36: mol_type = other DNA

SEQ ID NO: 2207 - DNA, 37 bp, synthetic construct
  misc_feature 1..37: note = Synthetic oligonucleotide
  source 1..37: mol_type = other DNA
tggtctgcacacgcacgtcgcctcttggggttatgga

SEQ ID NO: 2208 - DNA, 38 bp, synthetic construct
  misc_feature 1..38: note = Synthetic oligonucleotide
  source 1..38: mol_type = other DNA
tgtagttttgcaatctatgggctaggaccatgtcatga

SEQ ID NO: 2209 - DNA, 37 bp, synthetic construct
  misc_feature 1..37: note = Synthetic oligonucleotide
  source 1..37: mol_type = other DNA
tgctgttctcctggcgataggagattagccggacgga

SEQ ID NO: 2210 - DNA, 36 bp, synthetic construct
  misc_feature 1..36: note = Synthetic oligonucleotide
  source 1..36: mol_type = other DNA
tgctaagagggctaaggccacacacttaataactta

SEQ ID NO: 2211 - DNA, 35 bp, synthetic construct; identical to SEQ ID NO: 2029
  misc_feature 1..35: note = Synthetic oligonucleotide
  source 1..35: mol_type = other DNA

SEQ ID NO: 2212 - DNA, 38 bp, synthetic construct; identical to SEQ ID NO: 1609
  misc_feature 1..38: note = Synthetic oligonucleotide
  source 1..38: mol_type = other DNA

SEQ ID NO: 2213 - DNA, 36 bp, synthetic construct
  misc_feature 1..36: note = Synthetic oligonucleotide
  source 1..36: mol_type = other DNA
tggagtactagttccgaggacgtgagggaagactcg

SEQ ID NO: 2214 - DNA, 35 bp, synthetic construct
  misc_feature 1..35: note = Synthetic oligonucleotide
  source 1..35: mol_type = other DNA
tggtccctggttccacttcattgagagcagagcat

SEQ ID NO: 2215 - DNA, 36 bp, synthetic construct
  misc_feature 1..36: note = Synthetic oligonucleotide
  source 1..36: mol_type = other DNA
tgctcggatcttcgattcgtgccgcctgacaaatca

SEQ ID NO: 2216 - DNA, 35 bp, synthetic construct; identical to SEQ ID NO: 1644
  misc_feature 1..35: note = Synthetic oligonucleotide
  source 1..35: mol_type = other DNA

SEQ ID NO: 2217 - DNA, 38 bp, synthetic construct
  misc_feature 1..38: note = Synthetic oligonucleotide
  source 1..38: mol_type = other DNA
ttacgatgctcaagggtcccgttcgttcacagatatga

SEQ ID NO: 2218 - DNA, 38 bp, synthetic construct
  misc_feature 1..38: note = Synthetic oligonucleotide
  source 1..38: mol_type = other DNA
ttacaaaccccggtgctctaaagttatcgatctcttga

SEQ ID NO: 2219 - DNA, 35 bp, synthetic construct
  misc_feature 1..35: note = Synthetic oligonucleotide
  source 1..35: mol_type = other DNA
tgttggggggttagcacgggtttatgggttgcttc

SEQ ID NO: 2220 - DNA, 35 bp, synthetic construct
  misc_feature 1..35: note = Synthetic oligonucleotide
  source 1..35: mol_type = other DNA
ttgcagtggagtaagccctgaccgaggagcgacga

SEQ ID NO: 2221 - DNA, 36 bp, synthetic construct
  misc_feature 1..36: note = Synthetic oligonucleotide
  source 1..36: mol_type = other DNA
ttctcgcctacatctatctcaatattgtcctaccga

SEQ ID NO: 2222 - DNA, 36 bp, synthetic construct
  misc_feature 1..36: note = Synthetic oligonucleotide
  source 1..36: mol_type = other DNA
ttgacatgcgatgtgcacagttagttaatttcaaca

SEQ ID NO: 2223 - DNA, 37 bp, synthetic construct
  misc_feature 1..37: note = Synthetic oligonucleotide
  source 1..37: mol_type = other DNA
ttctatttactaaatacaacctttgtagcagacaaga

SEQ ID NO: 2224 - DNA, 36 bp, synthetic construct
  misc_feature 1..36: note = Synthetic oligonucleotide
  source 1..36: mol_type = other DNA
ttccacacttcactgtacccactcttaccagccaca

SEQ ID NO: 2225 - DNA, 36 bp, synthetic construct
  misc_feature 1..36: note = Synthetic oligonucleotide
  source 1..36: mol_type = other DNA
ttcctctagcctccgactggcgtgtgactctaaaga

SEQ ID NO: 2226 - DNA, 35 bp, synthetic construct
  misc_feature 1..35: note = Synthetic oligonucleotide
  source 1..35: mol_type = other DNA
tttccgctatagtgcttctggtacgacgcgtacgg

SEQ ID NO: 2227 - DNA, 38 bp, synthetic construct
  misc_feature 1..38: note = Synthetic oligonucleotide
  source 1..38: mol_type = other DNA
tttatactcatacccgaactgttccacaccgcaactga

SEQ ID NO: 2228 - DNA, 38 bp, synthetic construct
  misc_feature 1..38: note = Synthetic oligonucleotide
  source 1..38: mol_type = other DNA
tttattcgccctttgttgacctacaccacatcacttga

SEQ ID NO: 2229 - DNA, 35 bp, synthetic construct; identical to SEQ ID NO: 1605
  misc_feature 1..35: note = Synthetic oligonucleotide
  source 1..35: mol_type = other DNA

SEQ ID NO: 2230 - DNA, 38 bp, synthetic construct
  misc_feature 1..38: note = Synthetic oligonucleotide
  source 1..38: mol_type = other DNA
ttgtagtttggccctttcgagggccgttgcctggttga

SEQ ID NO: 2231 - DNA, 38 bp, synthetic construct
  misc_feature 1..38: note = Synthetic oligonucleotide
  source 1..38: mol_type = other DNA
tttttgttccataggtacggtctccggaggaatcgtga

SEQ ID NO: 2232 - DNA, 38 bp, synthetic construct
  misc_feature 1..38: note = Synthetic oligonucleotide
  source 1..38: mol_type = other DNA
ttttgctaacgcgacggaggcgccgagagctatgctga

SEQ ID NO: 2233 - DNA, 35 bp, synthetic construct; identical to SEQ ID NO: 1599
  misc_feature 1..35: note = Synthetic oligonucleotide
  source 1..35: mol_type = other DNA

SEQ ID NO: 2234 - DNA, 37 bp, synthetic construct; identical to SEQ ID NO: 1649
  misc_feature 1..37: note = Synthetic oligonucleotide
  source 1..37: mol_type = other DNA

SEQ ID NO: 2235 - DNA, 36 bp, synthetic construct; identical to SEQ ID NO: 1651
  misc_feature 1..36: note = Synthetic oligonucleotide
  source 1..36: mol_type = other DNA

SEQ ID NO: 2236 - DNA, 36 bp, synthetic construct; identical to SEQ ID NO: 1652
  misc_feature 1..36: note = Synthetic oligonucleotide
  source 1..36: mol_type = other DNA

SEQ ID NO: 2237 - DNA, 37 bp, synthetic construct
  misc_feature 1..37: note = Synthetic oligonucleotide
  source 1..37: mol_type = other DNA
aacgcctaactggacagaaaaatcgtacgctaccaga

SEQ ID NO: 2238 - DNA, 38 bp, synthetic construct; identical to SEQ ID NO: 1653
  misc_feature 1..38: note = Synthetic oligonucleotide
  source 1..38: mol_type = other DNA

SEQ ID NO: 2239 - DNA, 38 bp, synthetic construct; identical to SEQ ID NO: 1792
  misc_feature 1..38: note = Synthetic oligonucleotide
  source 1..38: mol_type = other DNA

SEQ ID NO: 2240 - DNA, 35 bp, synthetic construct
  misc_feature 1..35: note = Synthetic oligonucleotide
  source 1..35: mol_type = other DNA
tggactggtcgtggggtgtgaacgaatccaatgtg

SEQ ID NO: 2241 - DNA, 38 bp, synthetic construct; identical to SEQ ID NO: 1731
  misc_feature 1..38: note = Synthetic oligonucleotide
  source 1..38: mol_type = other DNA

SEQ ID NO: 2242 - DNA, 36 bp, synthetic construct
  misc_feature 1..36: note = Synthetic oligonucleotide
  source 1..36: mol_type = other DNA
tgcaccctacccatttagatgtatcagccacgggca

SEQ ID NO: 2243 - DNA, 36 bp, synthetic construct
  misc_feature 1..36: note = Synthetic oligonucleotide
  source 1..36: mol_type = other DNA
aacccgtagtagcacaccctgtctaacccaaatcaa

SEQ ID NO: 2244 - DNA, 35 bp, synthetic construct
  misc_feature 1..35: note = Synthetic oligonucleotide
  source 1..35: mol_type = other DNA
aaacgcgatcttacatcattacaatccctcaaccc

SEQ ID NO: 2245 - DNA, 35 bp, synthetic construct
  misc_feature 1..35: note = Synthetic oligonucleotide
  source 1..35: mol_type = other DNA
aaatcccatcgagcccttaacccagaccaactacg

SEQ ID NO: 2246 - DNA, 38 bp, synthetic construct
  misc_feature 1..38: note = Synthetic oligonucleotide
  source 1..38: mol_type = other DNA
aagaacatgagactgaatatcgtacgcgagtaaaatga

SEQ ID NO: 2247 - DNA, 35 bp, synthetic construct
  misc_feature 1..35: note = Synthetic oligonucleotide
  source 1..35: mol_type = other DNA
aagagtataggtccgagggaggacctactaattac

SEQ ID NO: 2248 - DNA, 38 bp, synthetic construct
  misc_feature 1..38: note = Synthetic oligonucleotide
  source 1..38: mol_type = other DNA
aatttcggttacaccccgctctctatcactatacgtga

SEQ ID NO: 2249 - DNA, 37 bp, synthetic construct
  misc_feature 1..37: note = Synthetic oligonucleotide
  source 1..37: mol_type = other DNA
accactagagtcctcaagaactcatccacccacctga

SEQ ID NO: 2250 - DNA, 35 bp, synthetic construct
  misc_feature 1..35: note = Synthetic oligonucleotide
  source 1..35: mol_type = other DNA
acggtatttgttttttcgattgatggggaagtata

SEQ ID NO: 2251 - DNA, 37 bp, synthetic construct
  misc_feature 1..37: note = Synthetic oligonucleotide
  source 1..37: mol_type = other DNA
accggcgaataacgccaaagcctgcgactggccttga

SEQ ID NO: 2252 - DNA, 35 bp, synthetic construct
  misc_feature 1..35: note = Synthetic oligonucleotide
  source 1..35: mol_type = other DNA
acgcttttaaaaccatacactcgataactataccc

SEQ ID NO: 2253 - DNA, 36 bp, synthetic construct
  misc_feature 1..36: note = Synthetic oligonucleotide
  source 1..36: mol_type = other DNA
accctactattaacccatcaaaagttcgctacccta

SEQ ID NO: 2254 - DNA, 36 bp, synthetic construct
  misc_feature 1..36: note = Synthetic oligonucleotide
  source 1..36: mol_type = other DNA
acgcccatcgtttcgggcctttgtccatttcataca

SEQ ID NO: 2255 - DNA, 35 bp, synthetic construct
  misc_feature 1..35: note = Synthetic oligonucleotide
  source 1..35: mol_type = other DNA
accttcccttcaacgggtgtattccggcgggtagc

SEQ ID NO: 2256 - DNA, 36 bp, synthetic construct
  misc_feature 1..36: note = Synthetic oligonucleotide
  source 1..36: mol_type = other DNA
acttcacccacacaataccatcatcgataactcaaa

SEQ ID NO: 2257 - DNA, 35 bp, synthetic construct
  misc_feature 1..35: note = Synthetic oligonucleotide
  source 1..35: mol_type = other DNA
agcggctaatcactgaagtagccccaggttttgaa

SEQ ID NO: 2258 - DNA, 37 bp, synthetic construct
  misc_feature 1..37: note = Synthetic oligonucleotide
  source 1..37: mol_type = other DNA
agcaggcccaacggcctctgggttagtatccgcgtga

SEQ ID NO: 2259 - DNA, 36 bp, synthetic construct
  misc_feature 1..36: note = Synthetic oligonucleotide
  source 1..36: mol_type = other DNA
agccgatccttgtccccgttgaaggccggatcgaaa

SEQ ID NO: 2260 - DNA, 38 bp, synthetic construct
  misc_feature 1..38: note = Synthetic oligonucleotide
  source 1..38: mol_type = other DNA
aggcatctcaagcgctcggaggtacgcactatttctga

SEQ ID NO: 2261 - DNA, 35 bp, synthetic construct
  misc_feature 1..35: note = Synthetic oligonucleotide
  source 1..35: mol_type = other DNA
agagacggcttcaacgcggctttcgggctctcttc

SEQ ID NO: 2262 - DNA, 35 bp, synthetic construct
  misc_feature 1..35: note = Synthetic oligonucleotide
  source 1..35: mol_type = other DNA
agtacccccttatccctggggcctcccggggtacc

SEQ ID NO: 2263 - DNA, 36 bp, synthetic construct
  misc_feature 1..36: note = Synthetic oligonucleotide
  source 1..36: mol_type = other DNA
atcaacaccattccctatatccaacactaaacgtaa

SEQ ID NO: 2264 - DNA, 37 bp, synthetic construct
  misc_feature 1..37: note = Synthetic oligonucleotide
  source 1..37: mol_type = other DNA
agtttctcgacaggggcactctggccacgtggctgga

SEQ ID NO: 2265 - DNA, 35 bp, synthetic construct
  misc_feature 1..35: note = Synthetic oligonucleotide
  source 1..35: mol_type = other DNA
aggggatactcagaacccgatgtaaatcttaagaa

SEQ ID NO: 2266 - DNA, 37 bp, synthetic construct
  misc_feature 1..37: note = Synthetic oligonucleotide
  source 1..37: mol_type = other DNA
atcttcccaccacttgtgccttatcattgccccccga

SEQ ID NO: 2267 - DNA, 35 bp, synthetic construct; identical to SEQ ID NO: 1892
  misc_feature 1..35: note = Synthetic oligonucleotide
  source 1..35: mol_type = other DNA

SEQ ID NO: 2268 - DNA, 35 bp, synthetic construct
  misc_feature 1..35: note = Synthetic oligonucleotide
  source 1..35: mol_type = other DNA
ccagctagaccagacgaatgtggaactgaatctgc

SEQ ID NO: 2269 - DNA, 35 bp, synthetic construct
  misc_feature 1..35: note = Synthetic oligonucleotide
  source 1..35: mol_type = other DNA
ccctaaaagcgacccactcagcggatttgacttgc

SEQ ID NO: 2270 - DNA, 35 bp, synthetic construct
  misc_feature 1..35: note = Synthetic oligonucleotide
  source 1..35: mol_type = other DNA
ccaccccaccgagaggggctcatggcatacgctga

SEQ ID NO: 2271 - DNA, 36 bp, synthetic construct
  misc_feature 1..36: note = Synthetic oligonucleotide
  source 1..36: mol_type = other DNA
cccgggaacacggtccgttcgtaggagaacgaccaa

SEQ ID NO: 2272 - DNA, 38 bp, synthetic construct
  misc_feature 1..38: note = Synthetic oligonucleotide
  source 1..38: mol_type = other DNA
ccatgctctccggaggccgttttacggagggagcgtga

SEQ ID NO: 2273 - DNA, 36 bp, synthetic construct; identical to SEQ ID NO: 1651
  misc_feature 1..36: note = Synthetic oligonucleotide
  source 1..36: mol_type = other DNA

SEQ ID NO: 2274 - DNA, 37 bp, synthetic construct
  misc_feature 1..37: note = Synthetic oligonucleotide
  source 1..37: mol_type = other DNA
cgcttccgctacgtaccccccgggcgttcgccttgga

SEQ ID NO: 2275 - DNA, 37 bp, synthetic construct
  misc_feature 1..37: note = Synthetic oligonucleotide
  source 1..37: mol_type = other DNA
ctcaaagcaacttgctggtgccagcaccgaagtccga

SEQ ID NO: 2276 - DNA, 38 bp, synthetic construct
  misc_feature 1..38: note = Synthetic oligonucleotide
  source 1..38: mol_type = other DNA
ccttacatttatgttgaggcccccggtaattattgtga

SEQ ID NO: 2277 - DNA, 35 bp, synthetic construct
  misc_feature 1..35: note = Synthetic oligonucleotide
  source 1..35: mol_type = other DNA
ctggtaccctgcgattcgggtctcgacttggttcc

SEQ ID NO: 2278 - DNA, 37 bp, synthetic construct
  misc_feature 1..37: note = Synthetic oligonucleotide
  source 1..37: mol_type = other DNA
gaacgtacgccttcctcgtaataattggaaccttcta

SEQ ID NO: 2279 - DNA, 35 bp, synthetic construct
  misc_feature 1..35: note = Synthetic oligonucleotide
  source 1..35: mol_type = other DNA
cttcgccatcttccggtcggcgaaaaacaggccac

SEQ ID NO: 2280 - DNA, 35 bp, synthetic construct; identical to SEQ ID NO: 1918
  misc_feature 1..35: note = Synthetic oligonucleotide
  source 1..35: mol_type = other DNA

SEQ ID NO: 2281 - DNA, 37 bp, synthetic construct
  misc_feature 1..37: note = Synthetic oligonucleotide
  source 1..37: mol_type = other DNA
gaggacattggaccgccccatacgaacgccactctga

SEQ ID NO: 2282 - DNA, 36 bp, synthetic construct
  misc_feature 1..36: note = Synthetic oligonucleotide
  source 1..36: mol_type = other DNA
gagtacgactaattatcttaacaacatttatgaaca

SEQ ID NO: 2283 - DNA, 35 bp, synthetic construct
  misc_feature 1..35: note = Synthetic oligonucleotide
  source 1..35: mol_type = other DNA
gagtagttgcatcgaagcggaggcttttccggatc

SEQ ID NO: 2284 - DNA, 36 bp, synthetic construct
  misc_feature 1..36: note = Synthetic oligonucleotide
  source 1..36: mol_type = other DNA
gcactgtccccggttttctactaactctgatcttga

SEQ ID NO: 2285 - DNA, 38 bp, synthetic construct
  misc_feature 1..38: note = Synthetic oligonucleotide
  source 1..38: mol_type = other DNA
gcgtcctgcactgttttacagttcttggtaatatttga

SEQ ID NO: 2286 - DNA, 37 bp, synthetic construct
  misc_feature 1..37: note = Synthetic oligonucleotide
  source 1..37: mol_type = other DNA
ggcacacacctagcctgaaaggtcctttaacattgga

SEQ ID NO: 2287 - DNA, 37 bp, synthetic construct
  misc_feature 1..37: note = Synthetic oligonucleotide
  source 1..37: mol_type = other DNA
ggcccagtactcacgctagaccctcgaggggactcga

SEQ ID NO: 2288 - DNA, 35 bp, synthetic construct
  misc_feature 1..35: note = Synthetic oligonucleotide
  source 1..35: mol_type = other DNA
ggacccgtaccgacacctatagccttcccccagag

SEQ ID NO: 2289 - DNA, 37 bp, synthetic construct
  misc_feature 1..37: note = Synthetic oligonucleotide
  source 1..37: mol_type = other DNA
ggtctagcgggtacaccttctggggttcggtttgtga

SEQ ID NO: 2290 - DNA, 37 bp, synthetic construct; identical to SEQ ID NO: 1939
  misc_feature 1..37: note = Synthetic oligonucleotide
  source 1..37: mol_type = other DNA

SEQ ID NO: 2291 - DNA, 37 bp, synthetic construct
  misc_feature 1..37: note = Synthetic oligonucleotide
  source 1..37: mol_type = other DNA
gggaactcgcaaaatttcttgaccccaaggtacccga

SEQ ID NO: 2292 - DNA, 37 bp, synthetic construct
  misc_feature 1..37: note = Synthetic oligonucleotide
  source 1..37: mol_type = other DNA
ggtccttgagcatcaaatcgctaagggggtccgcaga

SEQ ID NO: 2293 - DNA, 37 bp, synthetic construct
  misc_feature 1..37: note = Synthetic oligonucleotide
  source 1..37: mol_type = other DNA
gtctggtttttatattcagagccctgtttgggttaga

SEQ ID NO: 2294 - DNA, 35 bp, synthetic construct
  misc_feature 1..35: note = Synthetic oligonucleotide
  source 1..35: mol_type = other DNA
taaggatagcgctcggcctttattgatacttgttt

SEQ ID NO: 2295 - DNA, 38 bp, synthetic construct
  misc_feature 1..38: note = Synthetic oligonucleotide
  source 1..38: mol_type = other DNA
taaccgcatcactttcacttgacactaatacctcatga

SEQ ID NO: 2296 - DNA, 36 bp, synthetic construct
  misc_feature 1..36: note = Synthetic oligonucleotide
  source 1..36: mol_type = other DNA
taatatccctgctctcgaacacttcgctttaaacta

SEQ ID NO: 2297 - DNA, 36 bp, synthetic construct; identical to SEQ ID NO: 1719
  misc_feature 1..36: note = Synthetic oligonucleotide
  source 1..36: mol_type = other DNA

SEQ ID NO: 2298 - DNA, 36 bp, synthetic construct
  misc_feature 1..36: note = Synthetic oligonucleotide
  source 1..36: mol_type = other DNA
gttccgctccagggaacagaggatcagggagttcga

SEQ ID NO: 2299 - DNA, 37 bp, synthetic construct
  misc_feature 1..37: note = Synthetic oligonucleotide
  source 1..37: mol_type = other DNA
tatatccgcatcccgaagcatagatctcaagtactga

SEQ ID NO: 2300 - DNA, 38 bp, synthetic construct
  misc_feature 1..38: note = Synthetic oligonucleotide
  source 1..38: mol_type = other DNA
tatacacccgaaaagcgggttatcaaaaattatcatga

SEQ ID NO: 2301 - DNA, 35 bp, synthetic construct
  misc_feature 1..35: note = Synthetic oligonucleotide
  source 1..35: mol_type = other DNA
tactatcttctagttcaacagccacttatgaccca

SEQ ID NO: 2302 - DNA, 35 bp, synthetic construct
  misc_feature 1..35: note = Synthetic oligonucleotide
  source 1..35: mol_type = other DNA
tacgccccttaacctctaaccagcgagggtagttc

SEQ ID NO: 2303 - DNA, 36 bp, synthetic construct
  misc_feature 1..36: note = Synthetic oligonucleotide
  source 1..36: mol_type = other DNA
tcaacgaccgcgaggttgaacgacgtggggactgta

SEQ ID NO: 2304 - DNA, 38 bp, synthetic construct
  misc_feature 1..38: note = Synthetic oligonucleotide
  source 1..38: mol_type = other DNA
tattatgttcacggccggaggggggccgggggatgcga

SEQ ID NO: 2305 - DNA, 36 bp, synthetic construct
  misc_feature 1..36: note = Synthetic oligonucleotide
  source 1..36: mol_type = other DNA
tcgcatacaacaaaattacgcctaaccataacacca

SEQ ID NO: 2306 - DNA, 38 bp, synthetic construct
  misc_feature 1..38: note = Synthetic oligonucleotide
  source 1..38: mol_type = other DNA
tgaagtactcgtaagttttatagtttttcattctatga

SEQ ID NO: 2307 - DNA, 36 bp, synthetic construct
  misc_feature 1..36: note = Synthetic oligonucleotide
  source 1..36: mol_type = other DNA
tgacaaaagtcccctgaggggtggactcgtgaccca

SEQ ID NO: 2308 - DNA, 35 bp, synthetic construct
  misc_feature 1..35: note = Synthetic oligonucleotide
  source 1..35: mol_type = other DNA
tgcgggtgcatgccgagtgagccgaacgacccatc

SEQ ID NO: 2309 - DNA, 38 bp, synthetic construct
  misc_feature 1..38: note = Synthetic oligonucleotide
  source 1..38: mol_type = other DNA
tggccggggtttggccccagaaagatacgccggggtga

SEQ ID NO: 2310 - DNA, 36 bp, synthetic construct
  misc_feature 1..36: note = Synthetic oligonucleotide
  source 1..36: mol_type = other DNA
tggacctactacgcttgggcaacgcgggggccccta

SEQ ID NO: 2311 - DNA, 38 bp, synthetic construct
  misc_feature 1..38: note = Synthetic oligonucleotide
  source 1..38: mol_type = other DNA
tggacgattttgccaccgttagtacaacccgggggtga

SEQ ID NO: 2312 - DNA, 35 bp, synthetic construct
  misc_feature 1..35: note = Synthetic oligonucleotide
  source 1..35: mol_type = other DNA
tgtagcccaggagaaaccctaccccaacggacgcg

SEQ ID NO: 2313 - DNA, 36 bp, synthetic construct
  misc_feature 1..36: note = Synthetic oligonucleotide
  source 1..36: mol_type = other DNA
tgtggcgagggccgcctccaggcatgaaatgtatca

SEQ ID NO: 2314 - DNA, 38 bp, synthetic construct
  misc_feature 1..38: note = Synthetic oligonucleotide
  source 1..38: mol_type = other DNA
tgtttgcttcatagtaacgttgagactgcataaactga

SEQ ID NO: 2315 - DNA, 35 bp, synthetic construct
  misc_feature 1..35: note = Synthetic oligonucleotide
  source 1..35: mol_type = other DNA
tgttagttccactttccgataatccgcctccctta

SEQ ID NO: 2316 - DNA, 35 bp, synthetic construct
  misc_feature 1..35: note = Synthetic oligonucleotide
  source 1..35: mol_type = other DNA
ttctcgacggccttccaggcgggagacaaagctgc

SEQ ID NO: 2317 - DNA, 38 bp, synthetic construct
  misc_feature 1..38: note = Synthetic oligonucleotide
  source 1..38: mol_type = other DNA
ttcatggacgaaacgggcggcggacatttattcgctga

SEQ ID NO: 2318 - DNA, 38 bp, synthetic construct
  misc_feature 1..38: note = Synthetic oligonucleotide
  source 1..38: mol_type = other DNA
tttgctccggtgtttgaccctcgcagtccggagagtga

SEQ ID NO: 2319 - DNA, 35 bp, synthetic construct; identical to SEQ ID NO: 2007
  misc_feature 1..35: note = Synthetic oligonucleotide
  source 1..35: mol_type = other DNA

SEQ ID NO: 2320 - DNA, 36 bp, synthetic construct; identical to SEQ ID NO: 1590
  misc_feature 1..36: note = Synthetic oligonucleotide
  source 1..36: mol_type = other DNA

SEQ ID NO: 2321 - DNA, 35 bp, synthetic construct; identical to SEQ ID NO: 1591
  misc_feature 1..35: note = Synthetic oligonucleotide
  source 1..35: mol_type = other DNA

SEQ ID NO: 2322 - DNA, 38 bp, synthetic construct; identical to SEQ ID NO: 2016
  misc_feature 1..38: note = Synthetic oligonucleotide
  source 1..38: mol_type = other DNA

SEQ ID NO: 2323 - DNA, 37 bp, synthetic construct
  misc_feature 1..37: note = Synthetic oligonucleotide
  source 1..37: mol_type = other DNA
aacgcgctggtcttcgtgtattgtttcgcgctaagga

SEQ ID NO: 2324 - DNA, 35 bp, synthetic construct
  misc_feature 1..35: note = Synthetic oligonucleotide
  source 1..35: mol_type = other DNA
aactatcattcatcttggtgtgatctacctttgtt

SEQ ID NO: 2325 - DNA, 37 bp, synthetic construct; identical to SEQ ID NO: 2005
  misc_feature 1..37: note = Synthetic oligonucleotide
  source 1..37: mol_type = other DNA

SEQ ID NO: 2326 - DNA, 36 bp, synthetic construct
  misc_feature 1..36: note = Synthetic oligonucleotide
  source 1..36: mol_type = other DNA
cttctatatatctcattcttccggtttattcaatca

SEQ ID NO: 2327 - DNA, 36 bp, synthetic construct; identical to SEQ ID NO: 1586
  misc_feature 1..36: note = Synthetic oligonucleotide
  source 1..36: mol_type = other DNA

SEQ ID NO: 2328 - DNA, 37 bp, synthetic construct; identical to SEQ ID NO: 1595
  misc_feature 1..37: note = Synthetic oligonucleotide
  source 1..37: mol_type = other DNA

SEQ ID NO: 2329 - DNA, 35 bp, synthetic construct; identical to SEQ ID NO: 1740
  misc_feature 1..35: note = Synthetic oligonucleotide
  source 1..35: mol_type = other DNA

SEQ ID NO: 2330 - DNA, 35 bp, synthetic construct
  misc_feature 1..35: note = Synthetic oligonucleotide
  source 1..35: mol_type = other DNA
acgcttcttttacttagctaaccattattcattgt

SEQ ID NO: 2331 - DNA, 37 bp, synthetic construct; identical to SEQ ID NO: 1587
  misc_feature 1..37: note = Synthetic oligonucleotide
  source 1..37: mol_type = other DNA

SEQ ID NO: 2332 - DNA, 38 bp, synthetic construct; identical to SEQ ID NO: 2012
  misc_feature 1..38: note = Synthetic oligonucleotide
  source 1..38: mol_type = other DNA

SEQ ID NO: 2333 - DNA, 35 bp, synthetic construct; identical to SEQ ID NO: 2014
  misc_feature 1..35: note = Synthetic oligonucleotide
  source 1..35: mol_type = other DNA

SEQ ID NO: 2334 - DNA, 38 bp, synthetic construct; identical to SEQ ID NO: 1596
  misc_feature 1..38: note = Synthetic oligonucleotide
  source 1..38: mol_type = other DNA

SEQ ID NO: 2335 - DNA, 35 bp, synthetic construct; identical to SEQ ID NO: 2028
  misc_feature 1..35: note = Synthetic oligonucleotide
  source 1..35: mol_type = other DNA

SEQ ID NO: 2336 - DNA, 35 bp, synthetic construct; identical to SEQ ID NO: 1644
  misc_feature 1..35: note = Synthetic oligonucleotide
  source 1..35: mol_type = other DNA

SEQ ID NO: 2337 - DNA, 36 bp, synthetic construct; identical to SEQ ID NO: 1638
  misc_feature 1..36: note = Synthetic oligonucleotide
  source 1..36: mol_type = other DNA

SEQ ID NO: 2338 - DNA, 36 bp, synthetic construct; identical to SEQ ID NO: 2038
  misc_feature 1..36: note = Synthetic oligonucleotide
  source 1..36: mol_type = other DNA

SEQ ID NO: 2339 - DNA, 35 bp, synthetic construct; identical to SEQ ID NO: 1606
  misc_feature 1..35: note = Synthetic oligonucleotide
  source 1..35: mol_type = other DNA

SEQ ID NO: 2340 - DNA, 35 bp, synthetic construct; identical to SEQ ID NO: 2045
  misc_feature 1..35: note = Synthetic oligonucleotide
  source 1..35: mol_type = other DNA

SEQ ID NO: 2341 - DNA, 38 bp, synthetic construct
  misc_feature 1..38: note = Synthetic oligonucleotide
  source 1..38: mol_type = other DNA
ttctgccggtttttacggtcaaattctagatagtttga

SEQ ID NO: 2342 - DNA, 36 bp, synthetic construct; identical to SEQ ID NO: 1769
  misc_feature 1..36: note = Synthetic oligonucleotide
  source 1..36: mol_type = other DNA

SEQ ID NO: 2343 - DNA, 38 bp, synthetic construct; identical to SEQ ID NO: 1601
  misc_feature 1..38: note = Synthetic oligonucleotide
  source 1..38: mol_type = other DNA

SEQ ID NO: 2344 - DNA, 36 bp, synthetic construct; identical to SEQ ID NO: 1604
  misc_feature 1..36: note = Synthetic oligonucleotide
  source 1..36: mol_type = other DNA

SEQ ID NO: 2345 - DNA, 35 bp, synthetic construct; identical to SEQ ID NO: 1605
  misc_feature 1..35: note = Synthetic oligonucleotide
  source 1..35: mol_type = other DNA

SEQ ID NO: 2346 - DNA, 35 bp, synthetic construct; identical to SEQ ID NO: 2042
  misc_feature 1..35: note = Synthetic oligonucleotide
  source 1..35: mol_type = other DNA

SEQ ID NO: 2347 - DNA, 36 bp, synthetic construct; identical to SEQ ID NO: 2043
  misc_feature 1..36: note = Synthetic oligonucleotide
  source 1..36: mol_type = other DNA

SEQ ID NO: 2348 - DNA, 36 bp, synthetic construct; identical to SEQ ID NO: 2047
  misc_feature 1..36: note = Synthetic oligonucleotide
  source 1..36: mol_type = other DNA

SEQ ID NO: 2349 - DNA, 36 bp, synthetic construct; identical to SEQ ID NO: 1611
  misc_feature 1..36: note = Synthetic oligonucleotide
  source 1..36: mol_type = other DNA

SEQ ID NO: 2350 - DNA, 36 bp, synthetic construct; identical to SEQ ID NO: 1750
  misc_feature 1..36: note = Synthetic oligonucleotide
  source 1..36: mol_type = other DNA

SEQ ID NO: 2351 - DNA, 36 bp, synthetic construct; identical to SEQ ID NO: 1598
  misc_feature 1..36: note = Synthetic oligonucleotide
  source 1..36: mol_type = other DNA

SEQ ID NO: 2352 - DNA, 35 bp, synthetic construct; identical to SEQ ID NO: 1599
  misc_feature 1..35: note = Synthetic oligonucleotide
  source 1..35: mol_type = other DNA

SEQ ID NO: 2353 - DNA, 37 bp, synthetic construct; identical to SEQ ID NO: 1649
  misc_feature 1..37: note = Synthetic oligonucleotide
  source 1..37: mol_type = other DNA

SEQ ID NO: 2354 - DNA, 36 bp, synthetic construct; identical to SEQ ID NO: 1603
  misc_feature 1..36: note = Synthetic oligonucleotide
  source 1..36: mol_type = other DNA

SEQ ID NO: 2355 - DNA, 36 bp, synthetic construct; identical to SEQ ID NO: 2048
  misc_feature 1..36: note = Synthetic oligonucleotide
  source 1..36: mol_type = other DNA

SEQ ID NO: 2356 - DNA, 38 bp, synthetic construct; identical to SEQ ID NO: 1609
  misc_feature 1..38: note = Synthetic oligonucleotide
  source 1..38: mol_type = other DNA

SEQ ID NO: 2357 - DNA, 35 bp, synthetic construct
  misc_feature 1..35: note = Synthetic oligonucleotide
  source 1..35: mol_type = other DNA
aaatcccaacgagcccttaacccagaccaactaca

SEQ ID NO: 2358 - DNA, 37 bp, synthetic construct; identical to SEQ ID NO: 2055
  misc_feature 1..37: note = Synthetic oligonucleotide
  source 1..37: mol_type = other DNA

SEQ ID NO: 2359 - DNA, 37 bp, synthetic construct
  misc_feature 1..37: note = Synthetic oligonucleotide
  source 1..37: mol_type = other DNA
aacgtagtgaggtattccgcaccccctttattcgtga

SEQ ID NO: 2360 - DNA, 36 bp, synthetic construct
  misc_feature 1..36: note = Synthetic oligonucleotide
  source 1..36: mol_type = other DNA
aacccaattcacatacactctcacccacactaaaca

SEQ ID NO: 2361 - DNA, 38 bp, synthetic construct
  misc_feature 1..38: note = Synthetic oligonucleotide
  source 1..38: mol_type = other DNA
aaaaccgctcgcttaagctttctttgactttttgatga

SEQ ID NO: 2362 - DNA, 36 bp, synthetic construct
  misc_feature 1..36: note = Synthetic oligonucleotide
  source 1..36: mol_type = other DNA
aatgcacaaccgcgctgaaaatcacctttatcgaaa

SEQ ID NO: 2363 - DNA, 37 bp, synthetic construct
  misc_feature 1..37: note = Synthetic oligonucleotide
  source 1..37: mol_type = other DNA
aattgatctttttgtttacgaattcgtattccattga

SEQ ID NO: 2364 - DNA, 38 bp, synthetic construct
  misc_feature 1..38: note = Synthetic oligonucleotide
  source 1..38: mol_type = other DNA
aatcaccacaaatactttcgcctatctcgcttatctga

SEQ ID NO: 2365 - DNA, 36 bp, synthetic construct
  misc_feature 1..36: note = Synthetic oligonucleotide
  source 1..36: mol_type = other DNA
aacttgtcttatgctctccaccttacctattaacaa

SEQ ID NO: 2366 - DNA, 37 bp, synthetic construct
  misc_feature 1..37: note = Synthetic oligonucleotide
  source 1..37: mol_type = other DNA
aactcctgatatcgtttcttcgtttccgccaattcta

SEQ ID NO: 2367 - DNA, 35 bp, synthetic construct; identical to SEQ ID NO: 2061
  misc_feature 1..35: note = Synthetic oligonucleotide
  source 1..35: mol_type = other DNA

SEQ ID NO: 2368 - DNA, 38 bp, synthetic construct; identical to SEQ ID NO: 2024
  misc_feature 1..38: note = Synthetic oligonucleotide
  source 1..38: mol_type = other DNA

SEQ ID NO: 2369 - DNA, 36 bp, synthetic construct
  misc_feature 1..36: note = Synthetic oligonucleotide
  source 1..36: mol_type = other DNA
accgggaacatttctgttgtttcatttcatcactaa

SEQ ID NO: 2370 - DNA, 35 bp, synthetic construct; identical to SEQ ID NO: 2330
  misc_feature 1..35: note = Synthetic oligonucleotide
  source 1..35: mol_type = other DNA

SEQ ID NO: 2371 - DNA, 37 bp, synthetic construct; identical to SEQ ID NO: 2067
  misc_feature 1..37: note = Synthetic oligonucleotide
  source 1..37: mol_type = other DNA

SEQ ID NO: 2372 - DNA, 35 bp, synthetic construct
  misc_feature 1..35: note = Synthetic oligonucleotide
  source 1..35: mol_type = other DNA
accgacgcactctcctttctaaaatctatctactt

SEQ ID NO: 2373 - DNA, 35 bp, synthetic construct
  misc_feature 1..35: note = Synthetic oligonucleotide
  source 1..35: mol_type = other DNA
acgttaatttcccaaaaacgatcccactttgaaca

SEQ ID NO: 2374 - DNA, 36 bp, synthetic construct
  misc_feature 1..36: note = Synthetic oligonucleotide
  source 1..36: mol_type = other DNA
actcgcccttcacgactttatcaaaatgtactttca

SEQ ID NO: 2375 - DNA, 38 bp, synthetic construct; identical to SEQ ID NO: 2071
  misc_feature 1..38: note = Synthetic oligonucleotide
  source 1..38: mol_type = other DNA

SEQ ID NO: 2376 - DNA, 35 bp, synthetic construct; identical to SEQ ID NO: 1597
  misc_feature 1..35: note = Synthetic oligonucleotide
  source 1..35: mol_type = other DNA

SEQ ID NO: 2377 - DNA, 36 bp, synthetic construct; identical to SEQ ID NO: 1617
  misc_feature 1..36: note = Synthetic oligonucleotide
  source 1..36: mol_type = other DNA

SEQ ID NO: 2378 - DNA, 36 bp, synthetic construct
  misc_feature 1..36: note = Synthetic oligonucleotide
  source 1..36: mol_type = other DNA
acttcgcccacacaataccattatcgataactcaaa

SEQ ID NO: 2379 - DNA, 35 bp, synthetic construct; identical to SEQ ID NO: 1591
  misc_feature 1..35: note = Synthetic oligonucleotide
  source 1..35: mol_type = other DNA

SEQ ID NO: 2380 - DNA, 36 bp, synthetic construct; identical to SEQ ID NO: 1590
  misc_feature 1..36: note = Synthetic oligonucleotide
  source 1..36: mol_type = other DNA

SEQ ID NO: 2381 - DNA, 38 bp, synthetic construct; identical to SEQ ID NO: 2023
  misc_feature 1..38: note = Synthetic oligonucleotide
  source 1..38: mol_type = other DNA

SEQ ID NO: 2382 - DNA, 36 bp, synthetic construct; identical to SEQ ID NO: 1586
  misc_feature 1..36: note = Synthetic oligonucleotide
  source 1..36: mol_type = other DNA

SEQ ID NO: 2383 - DNA, 35 bp, synthetic construct; identical to SEQ ID NO: 1620
  misc_feature 1..35: note = Synthetic oligonucleotide
  source 1..35: mol_type = other DNA

SEQ ID NO: 2384 - DNA, 35 bp, synthetic construct
  misc_feature 1..35: note = Synthetic oligonucleotide
  source 1..35: mol_type = other DNA
atatgcccgctccctactcaatatcttcccataca

SEQ ID NO: 2385 - DNA, 35 bp, synthetic construct; identical to SEQ ID NO: 1594
  misc_feature 1..35: note = Synthetic oligonucleotide
  source 1..35: mol_type = other DNA

SEQ ID NO: 2386 - DNA, 37 bp, synthetic construct
  misc_feature 1..37: note = Synthetic oligonucleotide
  source 1..37: mol_type = other DNA
atgcattatcccagctttaaacgctctacccaccgaa

SEQ ID NO: 2387 - DNA, 36 bp, synthetic construct; identical to SEQ ID NO: 2092
  misc_feature 1..36: note = Synthetic oligonucleotide
  source 1..36: mol_type = other DNA

SEQ ID NO: 2388 - DNA, 35 bp, synthetic construct
  misc_feature 1..35: note = Synthetic oligonucleotide
  source 1..35: mol_type = other DNA
atctgcttgtaagtccccgtgtatacctgttcagt

SEQ ID NO: 2389 - DNA, 35 bp, synthetic construct
  misc_feature 1..35: note = Synthetic oligonucleotide
  source 1..35: mol_type = other DNA
atcactggagtgatagtctgggccctgaaactcct

SEQ ID NO: 2390 - DNA, 36 bp, synthetic construct
  misc_feature 1..36: note = Synthetic oligonucleotide
  source 1..36: mol_type = other DNA
atcaccgtccttatcatacccacttcgttttttata

SEQ ID NO: 2391 - DNA, 35 bp, synthetic construct; identical to SEQ ID NO: 1740
  misc_feature 1..35: note = Synthetic oligonucleotide
  source 1..35: mol_type = other DNA

SEQ ID NO: 2392 - DNA, 37 bp, synthetic construct; identical to SEQ ID NO: 2094
  misc_feature 1..37: note = Synthetic oligonucleotide
  source 1..37: mol_type = other DNA

SEQ ID NO: 2393 - DNA, 36 bp, synthetic construct; identical to SEQ ID NO: 2098
  misc_feature 1..36: note = Synthetic oligonucleotide
  source 1..36: mol_type = other DNA

SEQ ID NO: 2394 - DNA, 37 bp, synthetic construct; identical to SEQ ID NO: 1587
  misc_feature 1..37: note = Synthetic oligonucleotide
  source 1..37: mol_type = other DNA

SEQ ID NO: 2395 - DNA, 38 bp, synthetic construct; identical to SEQ ID NO: 2100
  misc_feature 1..38: note = Synthetic oligonucleotide
  source 1..38: mol_type = other DNA

SEQ ID NO: 2396 - DNA, 35 bp, synthetic construct
  misc_feature 1..35: note = Synthetic oligonucleotide
  source 1..35: mol_type = other DNA
ccagcacactgacttttccttacccacctcctttc

SEQ ID NO: 2397 - DNA, 38 bp, synthetic construct
  misc_feature 1..38: note = Synthetic oligonucleotide
  source 1..38: mol_type = other DNA
ccccgccatggtttcaaatggctgaagctatctattga

SEQ ID NO: 2398 - DNA, 38 bp, synthetic construct
  misc_feature 1..38: note = Synthetic oligonucleotide
  source 1..38: mol_type = other DNA
ccggtatctgcactcgtttggaatcgaccaacccctga

SEQ ID NO: 2399 - DNA, 37 bp, synthetic construct
  misc_feature 1..37: note = Synthetic oligonucleotide
  source 1..37: mol_type = other DNA
ccgtctactgcaacaggaggccaccacggtcttccga

SEQ ID NO: 2400 - DNA, 37 bp, synthetic construct
  misc_feature 1..37: note = Synthetic oligonucleotide
  source 1..37: mol_type = other DNA
cgctcttcttactttattcaatatggtcataaattga

SEQ ID NO: 2401 - DNA, 37 bp, synthetic construct
  misc_feature 1..37: note = Synthetic oligonucleotide
  source 1..37: mol_type = other DNA
cgtttctttatcccaaagtcattcgcatgccctttga

SEQ ID NO: 2402 - DNA, 38 bp, synthetic construct; identical to SEQ ID NO: 1596
  misc_feature 1..38: note = Synthetic oligonucleotide
  source 1..38: mol_type = other DNA

SEQ ID NO: 2403 - DNA, 35 bp, synthetic construct
  misc_feature 1..35: note = Synthetic oligonucleotide
  source 1..35: mol_type = other DNA
cgcgcctccttccccgatgatatgccactgccgca

SEQ ID NO: 2404 - DNA, 35 bp, synthetic construct; identical to SEQ ID NO: 2114
  misc_feature 1..35: note = Synthetic oligonucleotide
  source 1..35: mol_type = other DNA

SEQ ID NO: 2405 - DNA, 37 bp, synthetic construct
  misc_feature 1..37: note = Synthetic oligonucleotide
  source 1..37: mol_type = other DNA
cgcttcttgggcaggaggcgacacaggttcatattga

SEQ ID NO: 2406 - DNA, 35 bp, synthetic construct; identical to SEQ ID NO: 2120
  misc_feature 1..35: note = Synthetic oligonucleotide
  source 1..35: mol_type = other DNA

SEQ ID NO: 2407 - DNA, 37 bp, synthetic construct
  misc_feature 1..37: note = Synthetic oligonucleotide
  source 1..37: mol_type = other DNA
ctgtcccttgtaaggattattcgtaggtatttagtga

SEQ ID NO: 2408 - DNA, 37 bp, synthetic construct
  misc_feature 1..37: note = Synthetic oligonucleotide
  source 1..37: mol_type = other DNA
ctgcggtcacctgcatagtaattaataatatacgtga

SEQ ID NO: 2409 - DNA, 37 bp, synthetic construct
  misc_feature 1..37: note = Synthetic oligonucleotide
  source 1..37: mol_type = other DNA
cttcgctaaatggctgggggaatcatactgccggaga

SEQ ID NO: 2410 - DNA, 35 bp, synthetic construct
  misc_feature 1..35: note = Synthetic oligonucleotide
  source 1..35: mol_type = other DNA
ctcctgcagatcttggtacctcttgttctttcata

SEQ ID NO: 2411 - DNA, 37 bp, synthetic construct; identical to SEQ ID NO: 1595
  misc_feature 1..37: note = Synthetic oligonucleotide
  source 1..37: mol_type = other DNA

SEQ ID NO: 2412 - DNA, 35 bp, synthetic construct
  misc_feature 1..35: note = Synthetic oligonucleotide
  source 1..35: mol_type = other DNA
gaggacttttacttatcaaccccacctttcgaaca

SEQ ID NO: 2413 - DNA, 35 bp, synthetic construct
  misc_feature 1..35: note = Synthetic oligonucleotide
  source 1..35: mol_type = other DNA
gagtacttgactcttgtatattttttctccccctt

SEQ ID NO: 2414 - DNA, 37 bp, synthetic construct
  misc_feature 1..37: note = Synthetic oligonucleotide
  source 1..37: mol_type = other DNA
gatcccgttccttttttaacgatctattttcttttga

SEQ ID NO: 2415 - DNA, 35 bp, synthetic construct; identical to SEQ ID NO: 2140
  misc_feature 1..35: note = Synthetic oligonucleotide
  source 1..35: mol_type = other DNA

SEQ ID NO: 2416 - DNA, 35 bp, synthetic construct; identical to SEQ ID NO: 2014
  misc_feature 1..35: note = Synthetic oligonucleotide
  source 1..35: mol_type = other DNA

SEQ ID NO: 2417 - DNA, 35 bp, synthetic construct; identical to SEQ ID NO: 1600
  misc_feature 1..35: note = Synthetic oligonucleotide
  source 1..35: mol_type = other DNA

SEQ ID NO: 2418 - DNA, 36 bp, synthetic construct; identical to SEQ ID NO: 2143
  misc_feature 1..36: note = Synthetic oligonucleotide
  source 1..36: mol_type = other DNA

SEQ ID NO: 2419 - DNA, 36 bp, synthetic construct; identical to SEQ ID NO: 2147
  misc_feature 1..36: note = Synthetic oligonucleotide
  source 1..36: mol_type = other DNA

SEQ ID NO: 2420 - DNA, 36 bp, synthetic construct; identical to SEQ ID NO: 2151
  misc_feature 1..36: note = Synthetic oligonucleotide
  source 1..36: mol_type = other DNA

SEQ ID NO: 2421 - DNA, 37 bp, synthetic construct
  misc_feature 1..37: note = Synthetic oligonucleotide
  source 1..37: mol_type = other DNA
gcggaatagtccacgggacgctaagcgtggagctcga

SEQ ID NO: 2422 - DNA, 36 bp, synthetic construct
  misc_feature 1..36: note = Synthetic oligonucleotide
  source 1..36: mol_type = other DNA
gcgtccactctatccttgctttaatacatcgttaaa

SEQ ID NO: 2423 - DNA, 38 bp, synthetic construct
  misc_feature 1..38: note = Synthetic oligonucleotide
  source 1..38: mol_type = other DNA
gcctttccaggttcttcttttcgaccgtttatttttga

SEQ ID NO: 2424 - DNA, 38 bp, synthetic construct
  misc_feature 1..38: note = Synthetic oligonucleotide
  source 1..38: mol_type = other DNA
ggccctggtggcaccaagccgcgagcccactcaactga

SEQ ID NO: 2425 - DNA, 35 bp, synthetic construct
  misc_feature 1..35: note = Synthetic oligonucleotide
  source 1..35: mol_type = other DNA
ggtgcccaactggtgcttctccttctttgagacgt

SEQ ID NO: 2426 - DNA, 38 bp, synthetic construct
  misc_feature 1..38: note = Synthetic oligonucleotide
  source 1..38: mol_type = other DNA
gggagtttttatcctacaatgtaaattatcatacttga

SEQ ID NO: 2427 - DNA, 38 bp, synthetic construct; identical to SEQ ID NO: 1601
  misc_feature 1..38: note = Synthetic oligonucleotide
  source 1..38: mol_type = other DNA

SEQ ID NO: 2428 - DNA, 36 bp, synthetic construct
  misc_feature 1..36: note = Synthetic oligonucleotide
  source 1..36: mol_type = other DNA
ggtcccactctgaccatcaattcacctaacttgtaa

SEQ ID NO: 2429 - DNA, 35 bp, synthetic construct; identical to SEQ ID NO: 1606
  misc_feature 1..35: note = Synthetic oligonucleotide
  source 1..35: mol_type = other DNA

SEQ ID NO: 2430 - DNA, 37 bp, synthetic construct; identical to SEQ ID NO: 2166
  misc_feature 1..37: note = Synthetic oligonucleotide
  source 1..37: mol_type = other DNA

SEQ ID NO: 2431 - DNA, 36 bp, synthetic construct; identical to SEQ ID NO: 1598
  misc_feature 1..36: note = Synthetic oligonucleotide
  source 1..36: mol_type = other DNA

SEQ ID NO: 2432 - DNA, 38 bp, synthetic construct; identical to SEQ ID NO: 1772
  misc_feature 1..38: note = Synthetic oligonucleotide
  source 1..38: mol_type = other DNA

SEQ ID NO: 2433 - DNA, 35 bp, synthetic construct
  misc_feature 1..35: note = Synthetic oligonucleotide
  source 1..35: mol_type = other DNA
gtcgaaagcggagcgactctccgcacaaccccaag

SEQ ID NO: 2434 - DNA, 36 bp, synthetic construct; identical to SEQ ID NO: 1602
  misc_feature 1..36: note = Synthetic oligonucleotide
  source 1..36: mol_type = other DNA

SEQ ID NO: 2435 - DNA, 36 bp, synthetic construct; identical to SEQ ID NO: 1603
  misc_feature 1..36: note = Synthetic oligonucleotide
  source 1..36: mol_type = other DNA

SEQ ID NO: 2436 - DNA, 35 bp, synthetic construct
  misc_feature 1..35: note = Synthetic oligonucleotide
  source 1..35: mol_type = other DNA
gttcagattttgctttgtgacctggtgtggggtct

SEQ ID NO: 2437 - DNA, 37 bp, synthetic construct; identical to SEQ ID NO: 2178
  misc_feature 1..37: note = Synthetic oligonucleotide
  source 1..37: mol_type = other DNA

SEQ ID NO: 2438 - DNA, 36 bp, synthetic construct; identical to SEQ ID NO: 2048
  misc_feature 1..36: note = Synthetic oligonucleotide
  source 1..36: mol_type = other DNA

SEQ ID NO: 2439 - DNA, 35 bp, synthetic construct; identical to SEQ ID NO: 1607
  misc_feature 1..35: note = Synthetic oligonucleotide
  source 1..35: mol_type = other DNA

SEQ ID NO: 2440 - DNA, 36 bp, synthetic construct
  misc_feature 1..36: note = Synthetic oligonucleotide
  source 1..36: mol_type = other DNA
tactctagtcagaggatctcttgcgatcaatatgga

SEQ ID NO: 2441 - DNA, 35 bp, synthetic construct
  misc_feature 1..35: note = Synthetic oligonucleotide
  source 1..35: mol_type = other DNA
tactgtccttttcaattcttgtcttggttttatta

SEQ ID NO: 2442 - DNA, 35 bp, synthetic construct
  misc_feature 1..35: note = Synthetic oligonucleotide
  source 1..35: mol_type = other DNA
tactcggccctactacacgaactcttttcaaatca

SEQ ID NO: 2443 - DNA, 35 bp, synthetic construct; identical to SEQ ID NO: 2186
  misc_feature 1..35: note = Synthetic oligonucleotide
  source 1..35: mol_type = other DNA

SEQ ID NO: 2444 - DNA, 38 bp, synthetic construct
  misc_feature 1..38: note = Synthetic oligonucleotide
  source 1..38: mol_type = other DNA
tattgtagcctgtacggcggctgcacctcgtacgttga

SEQ ID NO: 2445 - DNA, 35 bp, synthetic construct
  misc_feature 1..35: note = Synthetic oligonucleotide
  source 1..35: mol_type = other DNA
tcactttgcccttttgtttcttcattaattccttc

SEQ ID NO: 2446 - DNA, 38 bp, synthetic construct
  misc_feature 1..38: note = Synthetic oligonucleotide
  source 1..38: mol_type = other DNA
tcacgctcccggggttctatctatttcgttattcttga

SEQ ID NO: 2447 - DNA, 36 bp, synthetic construct; identical to SEQ ID NO: 1638
  misc_feature 1..36: note = Synthetic oligonucleotide
  source 1..36: mol_type = other DNA

SEQ ID NO: 2448 - DNA, 36 bp, synthetic construct; identical to SEQ ID NO: 2038
  misc_feature 1..36: note = Synthetic oligonucleotide
  source 1..36: mol_type = other DNA

SEQ ID NO: 2449 - DNA, 38 bp, synthetic construct; identical to SEQ ID NO: 1608
  misc_feature 1..38: note = Synthetic oligonucleotide
  source 1..38: mol_type = other DNA

SEQ ID NO: 2450 - DNA, 35 bp, synthetic construct
  misc_feature 1..35: note = Synthetic oligonucleotide
  source 1..35: mol_type = other DNA
tccatcatattcattattccatgcctacccatccc

SEQ ID NO: 2451 - DNA, 37 bp, synthetic construct; identical to SEQ ID NO: 1639
  misc_feature 1..37: note = Synthetic oligonucleotide
  source 1..37: mol_type = other DNA

SEQ ID NO: 2452 - DNA, 38 bp, synthetic construct
  misc_feature 1..38: note = Synthetic oligonucleotide
  source 1..38: mol_type = other DNA
tccccataatctccgtcctcattgcttccaaaatttga

SEQ ID NO: 2453 - DNA, 38 bp, synthetic construct
  misc_feature 1..38: note = Synthetic oligonucleotide
  source 1..38: mol_type = other DNA
tcccctcgccactgacccatctactcgccaaatcttga

SEQ ID NO: 2454 - DNA, 38 bp, synthetic construct
  misc_feature 1..38: note = Synthetic oligonucleotide
  source 1..38: mol_type = other DNA
tcgggcaataccctttcccatattatcttctttcctta

SEQ ID NO: 2455 - DNA, 36 bp, synthetic construct
  misc_feature 1..36: note = Synthetic oligonucleotide
  source 1..36: mol_type = other DNA
tctcgggattttccgcgactactcgagcgctactca

SEQ ID NO: 2456 - DNA, 36 bp, synthetic construct
  misc_feature 1..36: note = Synthetic oligonucleotide
  source 1..36: mol_type = other DNA
tcgcttccttgtacttcctattcccttttcaccaca

SEQ ID NO: 2457 - DNA, 36 bp, synthetic construct; identical to SEQ ID NO: 1604
  misc_feature 1..36: note = Synthetic oligonucleotide
  source 1..36: mol_type = other DNA

SEQ ID NO: 2458 - DNA, 36 bp, synthetic construct
  misc_feature 1..36: note = Synthetic oligonucleotide
  source 1..36: mol_type = other DNA
tcttcacgatatgcagtgaaaacaccacccaactta

SEQ ID NO: 2459 - DNA, 37 bp, synthetic construct
  misc_feature 1..37: note = Synthetic oligonucleotide
  source 1..37: mol_type = other DNA
tctgcttgatggtgctttcagtttcttacttctacga

SEQ ID NO: 2460 - DNA, 35 bp, synthetic construct
  misc_feature 1..35: note = Synthetic oligonucleotide
  source 1..35: mol_type = other DNA
tcttctgtaaccattttgttccggtttttttattt

SEQ ID NO: 2461 - DNA, 36 bp, synthetic construct
  misc_feature 1..36: note = Synthetic oligonucleotide
  source 1..36: mol_type = other DNA
tgaagctccgaaggggtgcacttgccgacagtagta

SEQ ID NO: 2462 - DNA, 35 bp, synthetic construct
  misc_feature 1..35: note = Synthetic oligonucleotide
  source 1..35: mol_type = other DNA
tgacgtctcctgttcggttaaccctgtgtgcctgt

SEQ ID NO: 2463 - DNA, 37 bp, synthetic construct
  misc_feature 1..37: note = Synthetic oligonucleotide
  source 1..37: mol_type = other DNA
tgcccttcttcgtttactcttatccacattaccttga

SEQ ID NO: 2464 - DNA, 36 bp, synthetic construct; identical to SEQ ID NO: 1750
  misc_feature 1..36: note = Synthetic oligonucleotide
  source 1..36: mol_type = other DNA

SEQ ID NO: 2465 - DNA, 36 bp, synthetic construct
  misc_feature 1..36: note = Synthetic oligonucleotide
  source 1..36: mol_type = other DNA
tgacatatcgctcttacatcccctcacacaatttca

SEQ ID NO: 2466 - DNA, 35 bp, synthetic construct
  misc_feature 1..35: note = Synthetic oligonucleotide
  source 1..35: mol_type = other DNA
tgctccgagtaccataaactaatttgaagctctac

SEQ ID NO: 2467 - DNA, 37 bp, synthetic construct; identical to SEQ ID NO: 2209
  misc_feature 1..37: note = Synthetic oligonucleotide
  source 1..37: mol_type = other DNA

SEQ ID NO: 2468 - DNA, 36 bp, synthetic construct
  misc_feature 1..36: note = Synthetic oligonucleotide
  source 1..36: mol_type = other DNA
tggaccggtcaaaggatggcaccggttcctctcaca

SEQ ID NO: 2469 - DNA, 38 bp, synthetic construct; identical to SEQ ID NO: 1609
  misc_feature 1..38: note = Synthetic oligonucleotide
  source 1..38: mol_type = other DNA

SEQ ID NO: 2470 - DNA, 38 bp, synthetic construct
  misc_feature 1..38: note = Synthetic oligonucleotide
  source 1..38: mol_type = other DNA
tgctttgtacaacgttggtgtttggcatttgctgttga

SEQ ID NO: 2471 - DNA, 38 bp, synthetic construct; identical to SEQ ID NO: 2218
  misc_feature 1..38: note = Synthetic oligonucleotide
  source 1..38: mol_type = other DNA

SEQ ID NO: 2472 - DNA, 35 bp, synthetic construct
  misc_feature 1..35: note = Synthetic oligonucleotide
  source 1..35: mol_type = other DNA
tgtgccactcgtgttcgaatttctgttccttatct

SEQ ID NO: 2473 - DNA, 37 bp, synthetic construct
  misc_feature 1..37: note = Synthetic oligonucleotide
  source 1..37: mol_type = other DNA
tgttacgcccgtcctctatacaccaattacgatatga

SEQ ID NO: 2474 - DNA, 36 bp, synthetic construct
  misc_feature 1..36: note = Synthetic oligonucleotide
  source 1..36: mol_type = other DNA
tgttaggcctttatttccattatcttaattgtttta

SEQ ID NO: 2475 - DNA, 35 bp, synthetic construct; identical to SEQ ID NO: 1644
  misc_feature 1..35: note = Synthetic oligonucleotide
  source 1..35: mol_type = other DNA

SEQ ID NO: 2476 - DNA, 36 bp, synthetic construct
  misc_feature 1..36: note = Synthetic oligonucleotide
  source 1..36: mol_type = other DNA
ttctgccggatacatttgattcaataactacttgta

SEQ ID NO: 2477 - DNA, 35 bp, synthetic construct
  misc_feature 1..35: note = Synthetic oligonucleotide
  source 1..35: mol_type = other DNA
ttctgcttgcgagccgtccagttagggccgccacc

SEQ ID NO: 2478 - DNA, 38 bp, synthetic construct; identical to SEQ ID NO: 2341
  misc_feature 1..38: note = Synthetic oligonucleotide
  source 1..38: mol_type = other DNA

SEQ ID NO: 2479 - DNA, 36 bp, synthetic construct
  misc_feature 1..36: note = Synthetic oligonucleotide
  source 1..36: mol_type = other DNA
ttgcacgccccaatacacctaatctttatccataca

SEQ ID NO: 2480 - DNA, 38 bp, synthetic construct
  misc_feature 1..38: note = Synthetic oligonucleotide
  source 1..38: mol_type = other DNA
ttcgttccggaccacccatttcctcaatcatatattga

SEQ ID NO: 2481 - DNA, 37 bp, synthetic construct
  misc_feature 1..37: note = Synthetic oligonucleotide
  source 1..37: mol_type = other DNA
ttctgcgttttacgatgctcgatgtctgtgacatgga

SEQ ID NO: 2482 - DNA, 36 bp, synthetic construct
  misc_feature 1..36: note = Synthetic oligonucleotide
  source 1..36: mol_type = other DNA
ttgctccgacctagtttactaaatttcaaccattga

SEQ ID NO: 2483 - DNA, 36 bp, synthetic construct
  misc_feature 1..36: note = Synthetic oligonucleotide
  source 1..36: mol_type = other DNA
tttcattataccccatcgactttctctctagttcca

SEQ ID NO: 2484 - DNA, 35 bp, synthetic construct
  misc_feature 1..35: note = Synthetic oligonucleotide
  source 1..35: mol_type = other DNA
ttgtcccaggcagtttccacgagaacgcgtacggt

SEQ ID NO: 2485 - DNA, 38 bp, synthetic construct
  misc_feature 1..38: note = Synthetic oligonucleotide
  source 1..38: mol_type = other DNA
tttggacgtatcactccctaaccatttttttaccctga

SEQ ID NO: 2486 - DNA, 36 bp, synthetic construct; identical to SEQ ID NO: 1611
  misc_feature 1..36: note = Synthetic oligonucleotide
  source 1..36: mol_type = other DNA

SEQ ID NO: 2487 - DNA, 35 bp, synthetic construct
  misc_feature 1..35: note = Synthetic oligonucleotide
  source 1..35: mol_type = other DNA
tttcctgtttcttctttgtgtgtccatataatcga

SEQ ID NO: 2488 - DNA, 35 bp, synthetic construct; identical to SEQ ID NO: 1605
  misc_feature 1..35: note = Synthetic oligonucleotide
  source 1..35: mol_type = other DNA

SEQ ID NO: 2489 - DNA, 36 bp, synthetic construct
  misc_feature 1..36: note = Synthetic oligonucleotide
  source 1..36: mol_type = other DNA
tttaaacgtacgatattacttccgatccatacatta

SEQ ID NO: 2490 - DNA, 37 bp, synthetic construct; identical to SEQ ID NO: 1649
  misc_feature 1..37: note = Synthetic oligonucleotide
  source 1..37: mol_type = other DNA

SEQ ID NO: 2491 - DNA, 35 bp, synthetic construct; identical to SEQ ID NO: 1599
  misc_feature 1..35: note = Synthetic oligonucleotide
  source 1..35: mol_type = other DNA

SEQ ID NO: 2492 - DNA, 36 bp, synthetic construct; identical to SEQ ID NO: 1651
  misc_feature 1..36: note = Synthetic oligonucleotide
  source 1..36: mol_type = other DNA

SEQ ID NO: 2493 - DNA, 36 bp, synthetic construct; identical to SEQ ID NO: 1652
  misc_feature 1..36: note = Synthetic oligonucleotide
  source 1..36: mol_type = other DNA

SEQ ID NO: 2494 - DNA, 37 bp, synthetic construct; identical to SEQ ID NO: 2237
  misc_feature 1..37: note = Synthetic oligonucleotide
  source 1..37: mol_type = other DNA

SEQ ID NO: 2495 - DNA, 38 bp, synthetic construct; identical to SEQ ID NO: 1653
  misc_feature 1..38: note = Synthetic oligonucleotide
  source 1..38: mol_type = other DNA

SEQ ID NO: 2496 - DNA, 37 bp, synthetic construct
  misc_feature 1..37: note = Synthetic oligonucleotide
  source 1..37: mol_type = other DNA
acaactatcaaataaacctgcgccctctatgaatgga

SEQ ID NO: 2497 - DNA, 36 bp, synthetic construct
  misc_feature 1..36: note = Synthetic oligonucleotide
  source 1..36: mol_type = other DNA
gaccaatagacccggccaagactggagatgaaagta

SEQ ID NO: 2498 - DNA, 38 bp, synthetic construct; identical to SEQ ID NO: 1792
  misc_feature 1..38: note = Synthetic oligonucleotide
  source 1..38: mol_type = other DNA

SEQ ID NO: 2499 - DNA, 36 bp, synthetic construct; identical to SEQ ID NO: 1661
  misc_feature 1..36: note = Synthetic oligonucleotide
  source 1..36: mol_type = other DNA

SEQ ID NO: 2500 - DNA, 35 bp, synthetic construct
  misc_feature 1..35: note = Synthetic oligonucleotide
  source 1..35: mol_type = other DNA
acggtatttgttttttcgattgatggggaagtaga

SEQ ID NO: 2501 - DNA, 38 bp, synthetic construct
  misc_feature 1..38: note = Synthetic oligonucleotide
  source 1..38: mol_type = other DNA
ccacccgtacgaagccgcgttttctgagtgcctattga

SEQ ID NO: 2502 - DNA, 38 bp, synthetic construct; identical to SEQ ID NO: 1731
  misc_feature 1..38: note = Synthetic oligonucleotide
  source 1..38: mol_type = other DNA

SEQ ID NO: 2503 - DNA, 35 bp, synthetic construct
  misc_feature 1..35: note = Synthetic oligonucleotide
  source 1..35: mol_type = other DNA
ggccaatttgaatgagggttgtgaattatttaaga

SEQ ID NO: 2504 - DNA, 37 bp, synthetic construct
  misc_feature 1..37: note = Synthetic oligonucleotide
  source 1..37: mol_type = other DNA
ggcctaaccatggggggtggtgattattatgaaggga

SEQ ID NO: 2505 - DNA, 36 bp, synthetic construct
  misc_feature 1..36: note = Synthetic oligonucleotide
  source 1..36: mol_type = other DNA
ttcatcgcggggccgaggtaagcctaatcttccgta

SEQ ID NO: 2506 - DNA, 37 bp, synthetic construct
  misc_feature 1..37: note = Synthetic oligonucleotide
  source 1..37: mol_type = other DNA
gtaactggtatcctaaaagaataggttcgtaccccga

SEQ ID NO: 2507 - DNA, 36 bp, synthetic construct; identical to SEQ ID NO: 2242
  misc_feature 1..36: note = Synthetic oligonucleotide
  source 1..36: mol_type = other DNA

SEQ ID NO: 2508 - DNA, 36 bp, synthetic construct; identical to SEQ ID NO: 2243
  misc_feature 1..36: note = Synthetic oligonucleotide
  source 1..36: mol_type = other DNA

SEQ ID NO: 2509 - DNA, 35 bp, synthetic construct; identical to SEQ ID NO: 2244
  misc_feature 1..35: note = Synthetic oligonucleotide
  source 1..35: mol_type = other DNA

SEQ ID NO: 2510 - DNA, 35 bp, synthetic construct; identical to SEQ ID NO: 2245
  misc_feature 1..35: note = Synthetic oligonucleotide
  source 1..35: mol_type = other DNA

SEQ ID NO: 2511 - DNA, 38 bp, synthetic construct; identical to SEQ ID NO: 2246
  misc_feature 1..38: note = Synthetic oligonucleotide
  source 1..38: mol_type = other DNA

SEQ ID NO: 2512 - DNA, 35 bp, synthetic construct; identical to SEQ ID NO: 2247
  misc_feature 1..35: note = Synthetic oligonucleotide
  source 1..35: mol_type = other DNA

SEQ ID NO: 2513 - DNA, 38 bp, synthetic construct; identical to SEQ ID NO: 2248
  misc_feature 1..38: note = Synthetic oligonucleotide
  source 1..38: mol_type = other DNA

SEQ ID NO: 2514 - DNA, 37 bp, synthetic construct; identical to SEQ ID NO: 2249
  misc_feature 1..37: note = Synthetic oligonucleotide
  source 1..37: mol_type = other DNA

SEQ ID NO: 2515 - DNA, 35 bp, synthetic construct; identical to SEQ ID NO: 2250
  misc_feature 1..35: note = Synthetic oligonucleotide
  source 1..35: mol_type = other DNA

SEQ ID NO: 2516 - DNA, 37 bp, synthetic construct; identical to SEQ ID NO: 2251
  misc_feature 1..37: note = Synthetic oligonucleotide
  source 1..37: mol_type = other DNA

SEQ ID NO: 2517 - DNA, 35 bp, synthetic construct; identical to SEQ ID NO: 2252
  misc_feature 1..35: note = Synthetic oligonucleotide
  source 1..35: mol_type = other DNA

SEQ ID NO: 2518 - DNA, 36 bp, synthetic construct; identical to SEQ ID NO: 2253
  misc_feature 1..36: note = Synthetic oligonucleotide
  source 1..36: mol_type = other DNA

SEQ ID NO: 2519 - DNA, 36 bp, synthetic construct; identical to SEQ ID NO: 2254
  misc_feature 1..36: note = Synthetic oligonucleotide
  source 1..36: mol_type = other DNA

SEQ ID NO: 2520 - DNA, 35 bp, synthetic construct; identical to SEQ ID NO: 2255
  misc_feature 1..35: note = Synthetic oligonucleotide
  source 1..35: mol_type = other DNA

SEQ ID NO: 2521 - DNA, 36 bp, synthetic construct; identical to SEQ ID NO: 2256
  misc_feature 1..36: note = Synthetic oligonucleotide
  source 1..36: mol_type = other DNA

SEQ ID NO: 2522 - DNA, 35 bp, synthetic construct; identical to SEQ ID NO: 2257
  misc_feature 1..35: note = Synthetic oligonucleotide
  source 1..35: mol_type = other DNA

SEQ ID NO: 2523 - DNA, 37 bp, synthetic construct; identical to SEQ ID NO: 2258
  misc_feature 1..37: note = Synthetic oligonucleotide
  source 1..37: mol_type = other DNA

SEQ ID NO: 2524 - DNA, 36 bp, synthetic construct; identical to SEQ ID NO: 2259
  misc_feature 1..36: note = Synthetic oligonucleotide
  source 1..36: mol_type = other DNA

SEQ ID NO: 2525 - DNA, 38 bp, synthetic construct; identical to SEQ ID NO: 2260
  misc_feature 1..38: note = Synthetic oligonucleotide
  source 1..38: mol_type = other DNA

SEQ ID NO: 2526 - DNA, 35 bp, synthetic construct; identical to SEQ ID NO: 2261
  misc_feature 1..35: note = Synthetic oligonucleotide
  source 1..35: mol_type = other DNA

SEQ ID NO: 2527 - DNA, 35 bp, synthetic construct; identical to SEQ ID NO: 2262
  misc_feature 1..35: note = Synthetic oligonucleotide
  source 1..35: mol_type = other DNA

SEQ ID NO: 2528 - DNA, 36 bp, synthetic construct; identical to SEQ ID NO: 2263
  misc_feature 1..36: note = Synthetic oligonucleotide
  source 1..36: mol_type = other DNA

SEQ ID NO: 2529 - DNA, 37 bp, synthetic construct; identical to SEQ ID NO: 2264
  misc_feature 1..37: note = Synthetic oligonucleotide
  source 1..37: mol_type = other DNA

SEQ ID NO: 2530 - DNA, 35 bp, synthetic construct; identical to SEQ ID NO: 2265
  misc_feature 1..35: note = Synthetic oligonucleotide
  source 1..35: mol_type = other DNA

SEQ ID NO: 2531 - DNA, 37 bp, synthetic construct; identical to SEQ ID NO: 2266
  misc_feature 1..37: note = Synthetic oligonucleotide
  source 1..37: mol_type = other DNA

SEQ ID NO: 2532 - DNA, 35 bp, synthetic construct; identical to SEQ ID NO: 1892
  misc_feature 1..35: note = Synthetic oligonucleotide
  source 1..35: mol_type = other DNA

SEQ ID NO: 2533 - DNA, 35 bp, synthetic construct; identical to SEQ ID NO: 2268
  misc_feature 1..35: note = Synthetic oligonucleotide
  source 1..35: mol_type = other DNA

SEQ ID NO: 2534 - DNA, 35 bp, synthetic construct; identical to SEQ ID NO: 2269
  misc_feature 1..35: note = Synthetic oligonucleotide
  source 1..35: mol_type = other DNA

SEQ ID NO: 2535 - DNA, 35 bp, synthetic construct; identical to SEQ ID NO: 2270
  misc_feature 1..35: note = Synthetic oligonucleotide
  source 1..35: mol_type = other DNA

SEQ ID NO: 2536 - DNA, 36 bp, synthetic construct; identical to SEQ ID NO: 2271
  misc_feature 1..36: note = Synthetic oligonucleotide
  source 1..36: mol_type = other DNA

SEQ ID NO: 2537 - DNA, 38 bp, synthetic construct; identical to SEQ ID NO: 2272
  misc_feature 1..38: note = Synthetic oligonucleotide
  source 1..38: mol_type = other DNA

SEQ ID NO: 2538 - DNA, 36 bp, synthetic construct; identical to SEQ ID NO: 1651
  misc_feature 1..36: note = Synthetic oligonucleotide
  source 1..36: mol_type = other DNA

SEQ ID NO: 2539 - DNA, 37 bp, synthetic construct; identical to SEQ ID NO: 2274
  misc_feature 1..37: note = Synthetic oligonucleotide
  source 1..37: mol_type = other DNA

SEQ ID NO: 2540 - DNA, 37 bp, synthetic construct; identical to SEQ ID NO: 2275
  misc_feature 1..37: note = Synthetic oligonucleotide
  source 1..37: mol_type = other DNA

SEQ ID NO: 2541 - DNA, 38 bp, synthetic construct; identical to SEQ ID NO: 2276
  misc_feature 1..38: note = Synthetic oligonucleotide
  source 1..38: mol_type = other DNA

SEQ ID NO: 2542 - DNA, 35 bp, synthetic construct; identical to SEQ ID NO: 2277
  misc_feature 1..35: note = Synthetic oligonucleotide
  source 1..35: mol_type = other DNA

SEQ ID NO: 2543 - DNA, 37 bp, synthetic construct; identical to SEQ ID NO: 2278
  misc_feature 1..37: note = Synthetic oligonucleotide
  source 1..37: mol_type = other DNA

SEQ ID NO: 2544 - DNA, 35 bp, synthetic construct; identical to SEQ ID NO: 2279
  misc_feature 1..35: note = Synthetic oligonucleotide
  source 1..35: mol_type = other DNA

SEQ ID NO: 2545 - DNA, 35 bp, synthetic construct; identical to SEQ ID NO: 1918
  misc_feature 1..35: note = Synthetic oligonucleotide
  source 1..35: mol_type = other DNA

SEQ ID NO: 2546 - DNA, 37 bp, synthetic construct; identical to SEQ ID NO: 2281
  misc_feature 1..37: note = Synthetic oligonucleotide
  source 1..37: mol_type = other DNA

SEQ ID NO: 2547 - DNA, 36 bp, synthetic construct; identical to SEQ ID NO: 2282
  misc_feature 1..36: note = Synthetic oligonucleotide
  source 1..36: mol_type = other DNA

SEQ ID NO: 2548 - DNA, 35 bp, synthetic construct; identical to SEQ ID NO: 2283
  misc_feature 1..35: note = Synthetic oligonucleotide
  source 1..35: mol_type = other DNA

SEQ ID NO: 2549 - DNA, 36 bp, synthetic construct; identical to SEQ ID NO: 2284
  misc_feature 1..36: note = Synthetic oligonucleotide
  source 1..36: mol_type = other DNA

SEQ ID NO: 2550 - DNA, 38 bp, synthetic construct; identical to SEQ ID NO: 2285
  misc_feature 1..38: note = Synthetic oligonucleotide
  source 1..38: mol_type = other DNA

SEQ ID NO: 2551 - DNA, 37 bp, synthetic construct; identical to SEQ ID NO: 2286
  misc_feature 1..37: note = Synthetic oligonucleotide
  source 1..37: mol_type = other DNA

SEQ ID NO: 2552 - DNA, 37 bp, synthetic construct; identical to SEQ ID NO: 2287
  misc_feature 1..37: note = Synthetic oligonucleotide
  source 1..37: mol_type = other DNA

SEQ ID NO: 2553 - DNA, 35 bp, synthetic construct; identical to SEQ ID NO: 2288
  misc_feature 1..35: note = Synthetic oligonucleotide
  source 1..35: mol_type = other DNA

SEQ ID NO: 2554 - DNA, 37 bp, synthetic construct; identical to SEQ ID NO: 2289
  misc_feature 1..37: note = Synthetic oligonucleotide
  source 1..37: mol_type = other DNA

SEQ ID NO: 2555 - DNA, 37 bp, synthetic construct; identical to SEQ ID NO: 1939
  misc_feature 1..37: note = Synthetic oligonucleotide
  source 1..37: mol_type = other DNA

SEQ ID NO: 2556 - DNA, 37 bp, synthetic construct; identical to SEQ ID NO: 2291
  misc_feature 1..37: note = Synthetic oligonucleotide
  source 1..37: mol_type = other DNA

SEQ ID NO: 2557 - DNA, 37 bp, synthetic construct; identical to SEQ ID NO: 2292
  misc_feature 1..37: note = Synthetic oligonucleotide
  source 1..37: mol_type = other DNA

SEQ ID NO: 2558 - DNA, 37 bp, synthetic construct; identical to SEQ ID NO: 2293
  misc_feature 1..37: note = Synthetic oligonucleotide
  source 1..37: mol_type = other DNA

SEQ ID NO: 2559 - DNA, 35 bp, synthetic construct; identical to SEQ ID NO: 2294
  misc_feature 1..35: note = Synthetic oligonucleotide
  source 1..35: mol_type = other DNA

SEQ ID NO: 2560 - DNA, 38 bp, synthetic construct; identical to SEQ ID NO: 2295
  misc_feature 1..38: note = Synthetic oligonucleotide
  source 1..38: mol_type = other DNA

SEQ ID NO: 2561 - DNA, 36 bp, synthetic construct; identical to SEQ ID NO: 2296
  misc_feature 1..36: note = Synthetic oligonucleotide
  source 1..36: mol_type = other DNA

SEQ ID NO: 2562 - DNA, 36 bp, synthetic construct; identical to SEQ ID NO: 1719
  misc_feature 1..36: note = Synthetic oligonucleotide
  source 1..36: mol_type = other DNA

SEQ ID NO: 2563 - DNA, 36 bp, synthetic construct; identical to SEQ ID NO: 2298
  misc_feature 1..36: note = Synthetic oligonucleotide
  source 1..36: mol_type = other DNA

SEQ ID NO: 2564 - DNA, 37 bp, synthetic construct; identical to SEQ ID NO: 2299
  misc_feature 1..37: note = Synthetic oligonucleotide
  source 1..37: mol_type = other DNA

SEQ ID NO: 2565 - DNA, 38 bp, synthetic construct; identical to SEQ ID NO: 2300
  misc_feature 1..38: note = Synthetic oligonucleotide
  source 1..38: mol_type = other DNA

SEQ ID NO: 2566 - DNA, 35 bp, synthetic construct; identical to SEQ ID NO: 2301
  misc_feature 1..35: note = Synthetic oligonucleotide
  source 1..35: mol_type = other DNA

SEQ ID NO: 2567 - DNA, 35 bp, synthetic construct; identical to SEQ ID NO: 2302
  misc_feature 1..35: note = Synthetic oligonucleotide
  source 1..35: mol_type = other DNA

SEQ ID NO: 2568 - DNA, 36 bp, synthetic construct; identical to SEQ ID NO: 2303
  misc_feature 1..36: note = Synthetic oligonucleotide
  source 1..36: mol_type = other DNA

SEQ ID NO: 2569 - DNA, 38 bp, synthetic construct; identical to SEQ ID NO: 2304
  misc_feature 1..38: note = Synthetic oligonucleotide
  source 1..38: mol_type = other DNA

SEQ ID NO: 2570 - DNA, 36 bp, synthetic construct; identical to SEQ ID NO: 2305
  misc_feature 1..36: note = Synthetic oligonucleotide
  source 1..36: mol_type = other DNA

SEQ ID NO: 2571 - DNA, 38 bp, synthetic construct; identical to SEQ ID NO: 2306
  misc_feature 1..38: note = Synthetic oligonucleotide
  source 1..38: mol_type = other DNA

SEQ ID NO: 2572 - DNA, 36 bp, synthetic construct; identical to SEQ ID NO: 2307
  misc_feature 1..36: note = Synthetic oligonucleotide
  source 1..36: mol_type = other DNA

SEQ ID NO: 2573 - DNA, 35 bp, synthetic construct; identical to SEQ ID NO: 2308
  misc_feature 1..35: note = Synthetic oligonucleotide
  source 1..35: mol_type = other DNA

SEQ ID NO: 2574 - DNA, 38 bp, synthetic construct; identical to SEQ ID NO: 2309
  misc_feature 1..38: note = Synthetic oligonucleotide
  source 1..38: mol_type = other DNA

SEQ ID NO: 2575 - DNA, 36 bp, synthetic construct; identical to SEQ ID NO: 2310
  misc_feature 1..36: note = Synthetic oligonucleotide
  source 1..36: mol_type = other DNA

SEQ ID NO: 2576 - DNA, 38 bp, synthetic construct; identical to SEQ ID NO: 2311
  misc_feature 1..38: note = Synthetic oligonucleotide
  source 1..38: mol_type = other DNA

SEQ ID NO: 2577 - DNA, 35 bp, synthetic construct; identical to SEQ ID NO: 2312
  misc_feature 1..35: note = Synthetic oligonucleotide
  source 1..35: mol_type = other DNA

SEQ ID NO: 2578 - DNA, 36 bp, synthetic construct; identical to SEQ ID NO: 2313
  misc_feature 1..36: note = Synthetic oligonucleotide
  source 1..36: mol_type = other DNA

SEQ ID NO: 2579 - DNA, 38 bp, synthetic construct; identical to SEQ ID NO: 2314
  misc_feature 1..38: note = Synthetic oligonucleotide
  source 1..38: mol_type = other DNA

SEQ ID NO: 2580 - DNA, 35 bp, synthetic construct; identical to SEQ ID NO: 2315
  misc_feature 1..35: note = Synthetic oligonucleotide
  source 1..35: mol_type = other DNA

SEQ ID NO: 2581 - DNA, 35 bp, synthetic construct; identical to SEQ ID NO: 2316
  misc_feature 1..35: note = Synthetic oligonucleotide
  source 1..35: mol_type = other DNA

SEQ ID NO: 2582 - DNA, 38 bp, synthetic construct; identical to SEQ ID NO: 2317
  misc_feature 1..38: note = Synthetic oligonucleotide
  source 1..38: mol_type = other DNA

SEQ ID NO: 2583 - DNA, 38 bp, synthetic construct; identical to SEQ ID NO: 2318
  misc_feature 1..38: note = Synthetic oligonucleotide
  source 1..38: mol_type = other DNA

SEQ ID NO: 2584 - DNA, 38 bp, synthetic construct
  misc_feature 1..38: note = Synthetic oligonucleotide
  source 1..38: mol_type = other DNA
atctatcgcctatcgctacaacccgtattcgcttctta

SEQ ID NO: 2585 - DNA, 38 bp, synthetic construct; identical to SEQ ID NO: 1543
  misc_feature 1..38: note = Synthetic oligonucleotide
  source 1..38: mol_type = other DNA

SEQ ID NO: 2586 - DNA, 38 bp, synthetic construct; identical to SEQ ID NO: 1816
  misc_feature 1..38: note = Synthetic oligonucleotide
  source 1..38: mol_type = other DNA

SEQ ID NO: 2587 - DNA, 38 bp, synthetic construct
  misc_feature 1..38: note = Synthetic oligonucleotide
  source 1..38: mol_type = other DNA
attctctttattttatcgctttcatccagtgcatatga

SEQ ID NO: 2588 - DNA, 38 bp, synthetic construct; identical to SEQ ID NO: 1817
  misc_feature 1..38: note = Synthetic oligonucleotide
  source 1..38: mol_type = other DNA

SEQ ID NO: 2589 - DNA, 35 bp, synthetic construct
  misc_feature 1..35: note = Synthetic oligonucleotide
  source 1..35: mol_type = other DNA
ggcttcttatttgcttgaatatccgcttcctctct

SEQ ID NO: 2590 - DNA, 35 bp, synthetic construct; identical to SEQ ID NO: 1550
  misc_feature 1..35: note = Synthetic oligonucleotide
  source 1..35: mol_type = other DNA

SEQ ID NO: 2591 - DNA, 35 bp, synthetic construct; identical to SEQ ID NO: 1551
  misc_feature 1..35: note = Synthetic oligonucleotide
  source 1..35: mol_type = other DNA

SEQ ID NO: 2592 - DNA, 38 bp, synthetic construct; identical to SEQ ID NO: 1804
  misc_feature 1..38: note = Synthetic oligonucleotide
  source 1..38: mol_type = other DNA

SEQ ID NO: 2593 - DNA, 37 bp, synthetic construct; identical to SEQ ID NO: 1820
  misc_feature 1..37: note = Synthetic oligonucleotide
  source 1..37: mol_type = other DNA

SEQ ID NO: 2594 - DNA, 35 bp, synthetic construct; identical to SEQ ID NO: 2357
  misc_feature 1..35: note = Synthetic oligonucleotide
  source 1..35: mol_type = other DNA

SEQ ID NO: 2595 - DNA, 37 bp, synthetic construct; identical to SEQ ID NO: 2055
  misc_feature 1..37: note = Synthetic oligonucleotide
  source 1..37: mol_type = other DNA

SEQ ID NO: 2596 - DNA, 37 bp, synthetic construct; identical to SEQ ID NO: 2359
  misc_feature 1..37: note = Synthetic oligonucleotide
  source 1..37: mol_type = other DNA

SEQ ID NO: 2597 - DNA, 36 bp, synthetic construct; identical to SEQ ID NO: 2360
  misc_feature 1..36: note = Synthetic oligonucleotide
  source 1..36: mol_type = other DNA

SEQ ID NO: 2598 - DNA, 38 bp, synthetic construct; identical to SEQ ID NO: 2361
  misc_feature 1..38: note = Synthetic oligonucleotide
  source 1..38: mol_type = other DNA

SEQ ID NO: 2599 - DNA, 36 bp, synthetic construct; identical to SEQ ID NO: 2362
  misc_feature 1..36: note = Synthetic oligonucleotide
  source 1..36: mol_type = other DNA

SEQ ID NO: 2600 - DNA, 37 bp, synthetic construct; identical to SEQ ID NO: 2363
  misc_feature 1..37: note = Synthetic oligonucleotide
  source 1..37: mol_type = other DNA

SEQ ID NO: 2601 - DNA, 38 bp, synthetic construct; identical to SEQ ID NO: 2364
  misc_feature 1..38: note = Synthetic oligonucleotide
  source 1..38: mol_type = other DNA

SEQ ID NO: 2602 - DNA, 36 bp, synthetic construct; identical to SEQ ID NO: 2365
  misc_feature 1..36: note = Synthetic oligonucleotide
  source 1..36: mol_type = other DNA

SEQ ID NO: 2603 - DNA, 37 bp, synthetic construct; identical to SEQ ID NO: 2366
  misc_feature 1..37: note = Synthetic oligonucleotide
  source 1..37: mol_type = other DNA

SEQ ID NO: 2604 - DNA, 35 bp, synthetic construct; identical to SEQ ID NO: 2061
  misc_feature 1..35: note = Synthetic oligonucleotide
  source 1..35: mol_type = other DNA

SEQ ID NO: 2605 - DNA, 38 bp, synthetic construct; identical to SEQ ID NO: 2024
  misc_feature 1..38: note = Synthetic oligonucleotide
  source 1..38: mol_type = other DNA

SEQ ID NO: 2606 - DNA, 36 bp, synthetic construct; identical to SEQ ID NO: 2369
  misc_feature 1..36: note = Synthetic oligonucleotide
  source 1..36: mol_type = other DNA

SEQ ID NO: 2607 - DNA, 35 bp, synthetic construct; identical to SEQ ID NO: 2330
  misc_feature 1..35: note = Synthetic oligonucleotide
  source 1..35: mol_type = other DNA

SEQ ID NO: 2608 - DNA, 37 bp, synthetic construct; identical to SEQ ID NO: 2067
  misc_feature 1..37: note = Synthetic oligonucleotide
  source 1..37: mol_type = other DNA

SEQ ID NO: 2609 - DNA, 35 bp, synthetic construct; identical to SEQ ID NO: 2372
  misc_feature 1..35: note = Synthetic oligonucleotide
  source 1..35: mol_type = other DNA

SEQ ID NO: 2610 - DNA, 35 bp, synthetic construct; identical to SEQ ID NO: 2373
  misc_feature 1..35: note = Synthetic oligonucleotide
  source 1..35: mol_type = other DNA

SEQ ID NO: 2611 - DNA, 36 bp, synthetic construct; identical to SEQ ID NO: 2374
  misc_feature 1..36: note = Synthetic oligonucleotide
  source 1..36: mol_type = other DNA

SEQ ID NO: 2612 - DNA, 38 bp, synthetic construct; identical to SEQ ID NO: 2071
  misc_feature 1..38: note = Synthetic oligonucleotide
  source 1..38: mol_type = other DNA

SEQ ID NO: 2613 - DNA, 35 bp, synthetic construct; identical to SEQ ID NO: 1597
  misc_feature 1..35: note = Synthetic oligonucleotide
  source 1..35: mol_type = other DNA

SEQ ID NO: 2614 - DNA, 36 bp, synthetic construct; identical to SEQ ID NO: 1617
  misc_feature 1..36: note = Synthetic oligonucleotide
  source 1..36: mol_type = other DNA

SEQ ID NO: 2615 - DNA, 36 bp, synthetic construct; identical to SEQ ID NO: 2378
  misc_feature 1..36: note = Synthetic oligonucleotide
  source 1..36: mol_type = other DNA

SEQ ID NO: 2616 - DNA, 35 bp, synthetic construct; identical to SEQ ID NO: 1591
  misc_feature 1..35: note = Synthetic oligonucleotide
  source 1..35: mol_type = other DNA

SEQ ID NO: 2617 - DNA, 36 bp, synthetic construct; identical to SEQ ID NO: 1590
  misc_feature 1..36: note = Synthetic oligonucleotide
  source 1..36: mol_type = other DNA

SEQ ID NO: 2618 - DNA, 38 bp, synthetic construct; identical to SEQ ID NO: 2023
  misc_feature 1..38: note = Synthetic oligonucleotide
  source 1..38: mol_type = other DNA

SEQ ID NO: 2619 - DNA, 36 bp, synthetic construct; identical to SEQ ID NO: 1586
  misc_feature 1..36: note = Synthetic oligonucleotide
  source 1..36: mol_type = other DNA

SEQ ID NO: 2620 - DNA, 35 bp, synthetic construct; identical to SEQ ID NO: 1620
  misc_feature 1..35: note = Synthetic oligonucleotide
  source 1..35: mol_type = other DNA

SEQ ID NO: 2621 - DNA, 35 bp, synthetic construct; identical to SEQ ID NO: 2384
  misc_feature 1..35: note = Synthetic oligonucleotide
  source 1..35: mol_type = other DNA

SEQ ID NO: 2622 - DNA, 35 bp, synthetic construct; identical to SEQ ID NO: 1594
  misc_feature 1..35: note = Synthetic oligonucleotide
  source 1..35: mol_type = other DNA

SEQ ID NO: 2623 - DNA, 37 bp, synthetic construct; identical to SEQ ID NO: 2386
  misc_feature 1..37: note = Synthetic oligonucleotide
  source 1..37: mol_type = other DNA

SEQ ID NO: 2624 - DNA, 36 bp, synthetic construct; identical to SEQ ID NO: 2092
  misc_feature 1..36: note = Synthetic oligonucleotide
  source 1..36: mol_type = other DNA

SEQ ID NO: 2625 - DNA, 35 bp, synthetic construct; identical to SEQ ID NO: 2388
  misc_feature 1..35: note = Synthetic oligonucleotide
  source 1..35: mol_type = other DNA

SEQ ID NO: 2626 - DNA, 35 bp, synthetic construct; identical to SEQ ID NO: 2389
  misc_feature 1..35: note = Synthetic oligonucleotide
  source 1..35: mol_type = other DNA

SEQ ID NO: 2627 - DNA, 36 bp, synthetic construct; identical to SEQ ID NO: 2390
  misc_feature 1..36: note = Synthetic oligonucleotide
  source 1..36: mol_type = other DNA

SEQ ID NO: 2628 - DNA, 35 bp, synthetic construct; identical to SEQ ID NO: 1740
  misc_feature 1..35: note = Synthetic oligonucleotide
  source 1..35: mol_type = other DNA

SEQ ID NO: 2629 - DNA, 37 bp, synthetic construct; identical to SEQ ID NO: 2094
  misc_feature 1..37: note = Synthetic oligonucleotide
  source 1..37: mol_type = other DNA

SEQ ID NO: 2630 - DNA, 36 bp, synthetic construct; identical to SEQ ID NO: 2098
  misc_feature 1..36: note = Synthetic oligonucleotide
  source 1..36: mol_type = other DNA

SEQ ID NO: 2631 - DNA, 37 bp, synthetic construct; identical to SEQ ID NO: 1587
  misc_feature 1..37: note = Synthetic oligonucleotide
  source 1..37: mol_type = other DNA

SEQ ID NO: 2632 - DNA, 38 bp, synthetic construct; identical to SEQ ID NO: 2100
  misc_feature 1..38: note = Synthetic oligonucleotide
  source 1..38: mol_type = other DNA

SEQ ID NO: 2633 - DNA, 35 bp, synthetic construct; identical to SEQ ID NO: 2396
  misc_feature 1..35: note = Synthetic oligonucleotide
  source 1..35: mol_type = other DNA

SEQ ID NO: 2634 - DNA, 38 bp, synthetic construct; identical to SEQ ID NO: 2397
  misc_feature 1..38: note = Synthetic oligonucleotide
  source 1..38: mol_type = other DNA

SEQ ID NO: 2635 - DNA, 38 bp, synthetic construct; identical to SEQ ID NO: 2398
  misc_feature 1..38: note = Synthetic oligonucleotide
  source 1..38: mol_type = other DNA

SEQ ID NO: 2636 - DNA, 37 bp, synthetic construct; identical to SEQ ID NO: 2399
  misc_feature 1..37: note = Synthetic oligonucleotide
  source 1..37: mol_type = other DNA

SEQ ID NO: 2637 - DNA, 37 bp, synthetic construct; identical to SEQ ID NO: 2400
  misc_feature 1..37: note = Synthetic oligonucleotide
  source 1..37: mol_type = other DNA

SEQ ID NO: 2638 - DNA, 37 bp, synthetic construct; identical to SEQ ID NO: 2401
  misc_feature 1..37: note = Synthetic oligonucleotide
  source 1..37: mol_type = other DNA

SEQ ID NO: 2639 - DNA, 38 bp, synthetic construct; identical to SEQ ID NO: 1596
  misc_feature 1..38: note = Synthetic oligonucleotide
  source 1..38: mol_type = other DNA

SEQ ID NO: 2640 - DNA, 35 bp, synthetic construct; identical to SEQ ID NO: 2403
  misc_feature 1..35: note = Synthetic oligonucleotide
  source 1..35: mol_type = other DNA

SEQ ID NO: 2641 - DNA, 35 bp, synthetic construct; identical to SEQ ID NO: 2114
  misc_feature 1..35: note = Synthetic oligonucleotide
  source 1..35: mol_type = other DNA

SEQ ID NO: 2642 - DNA, 37 bp, synthetic construct; identical to SEQ ID NO: 2405
  misc_feature 1..37: note = Synthetic oligonucleotide
  source 1..37: mol_type = other DNA

SEQ ID NO: 2643 - DNA, 35 bp, synthetic construct; identical to SEQ ID NO: 2120
  misc_feature 1..35: note = Synthetic oligonucleotide
  source 1..35: mol_type = other DNA

SEQ ID NO: 2644 - DNA, 37 bp, synthetic construct; identical to SEQ ID NO: 2407
  misc_feature 1..37: note = Synthetic oligonucleotide
  source 1..37: mol_type = other DNA

SEQ ID NO: 2645 - DNA, 37 bp, synthetic construct; identical to SEQ ID NO: 2408
  misc_feature 1..37: note = Synthetic oligonucleotide
  source 1..37: mol_type = other DNA

SEQ ID NO: 2646 - DNA, 37 bp, synthetic construct; identical to SEQ ID NO: 2409
  misc_feature 1..37: note = Synthetic oligonucleotide
  source 1..37: mol_type = other DNA

SEQ ID NO: 2647 - DNA, 35 bp, synthetic construct; identical to SEQ ID NO: 2410
  misc_feature 1..35: note = Synthetic oligonucleotide
  source 1..35: mol_type = other DNA

SEQ ID NO: 2648 - DNA, 37 bp, synthetic construct; identical to SEQ ID NO: 1595
  misc_feature 1..37: note = Synthetic oligonucleotide
  source 1..37: mol_type = other DNA

SEQ ID NO: 2649 - DNA, 35 bp, synthetic construct; identical to SEQ ID NO: 2412
  misc_feature 1..35: note = Synthetic oligonucleotide
  source 1..35: mol_type = other DNA

SEQ ID NO: 2650 - DNA, 35 bp, synthetic construct; identical to SEQ ID NO: 2413
  misc_feature 1..35: note = Synthetic oligonucleotide
  source 1..35: mol_type = other DNA

SEQ ID NO: 2651 - DNA, 37 bp, synthetic construct; identical to SEQ ID NO: 2414
  misc_feature 1..37: note = Synthetic oligonucleotide
  source 1..37: mol_type = other DNA

SEQ ID NO: 2652 - DNA, 35 bp, synthetic construct; identical to SEQ ID NO: 2140
  misc_feature 1..35: note = Synthetic oligonucleotide
  source 1..35: mol_type = other DNA

SEQ ID NO: 2653 - DNA, 35 bp, synthetic construct; identical to SEQ ID NO: 2014
  misc_feature 1..35: note = Synthetic oligonucleotide
  source 1..35: mol_type = other DNA

SEQ ID NO: 2654 - DNA, 35 bp, synthetic construct; identical to SEQ ID NO: 1600
  misc_feature 1..35: note = Synthetic oligonucleotide
  source 1..35: mol_type = other DNA

SEQ ID NO: 2655 - DNA, 36 bp, synthetic construct; identical to SEQ ID NO: 2143
  misc_feature 1..36: note = Synthetic oligonucleotide
  source 1..36: mol_type = other DNA

SEQ ID NO: 2656 - DNA, 36 bp, synthetic construct; identical to SEQ ID NO: 2147
  misc_feature 1..36: note = Synthetic oligonucleotide
  source 1..36: mol_type = other DNA

SEQ ID NO: 2657 - DNA, 36 bp, synthetic construct; identical to SEQ ID NO: 2151
  misc_feature 1..36: note = Synthetic oligonucleotide
  source 1..36: mol_type = other DNA

SEQ ID NO: 2658 - DNA, 37 bp, synthetic construct; identical to SEQ ID NO: 2421
  misc_feature 1..37: note = Synthetic oligonucleotide
  source 1..37: mol_type = other DNA

SEQ ID NO: 2659 - DNA, 36 bp, synthetic construct; identical to SEQ ID NO: 2422
  misc_feature 1..36: note = Synthetic oligonucleotide
  source 1..36: mol_type = other DNA

SEQ ID NO: 2660 - DNA, 38 bp, synthetic construct; identical to SEQ ID NO: 2423
  misc_feature 1..38: note = Synthetic oligonucleotide
  source 1..38: mol_type = other DNA

SEQ ID NO: 2661 - DNA, 38 bp, synthetic construct; identical to SEQ ID NO: 2424
  misc_feature 1..38: note = Synthetic oligonucleotide
  source 1..38: mol_type = other DNA

SEQ ID NO: 2662 - DNA, 35 bp, synthetic construct; identical to SEQ ID NO: 2425
  misc_feature 1..35: note = Synthetic oligonucleotide
  source 1..35: mol_type = other DNA

SEQ ID NO: 2663 - DNA, 38 bp, synthetic construct; identical to SEQ ID NO: 2426
  misc_feature 1..38: note = Synthetic oligonucleotide
  source 1..38: mol_type = other DNA

SEQ ID NO: 2664 - DNA, 38 bp, synthetic construct; identical to SEQ ID NO: 1601
  misc_feature 1..38: note = Synthetic oligonucleotide
  source 1..38: mol_type = other DNA

SEQ ID NO: 2665 - DNA, 36 bp, synthetic construct; identical to SEQ ID NO: 2428
  misc_feature 1..36: note = Synthetic oligonucleotide
  source 1..36: mol_type = other DNA

SEQ ID NO: 2666 - DNA, 35 bp, synthetic construct; identical to SEQ ID NO: 1606
  misc_feature 1..35: note = Synthetic oligonucleotide
  source 1..35: mol_type = other DNA

SEQ ID NO: 2667 - DNA, 37 bp, synthetic construct; identical to SEQ ID NO: 2166
  misc_feature 1..37: note = Synthetic oligonucleotide
  source 1..37: mol_type = other DNA

SEQ ID NO: 2668 - DNA, 36 bp, synthetic construct; identical to SEQ ID NO: 1598
  misc_feature 1..36: note = Synthetic oligonucleotide
  source 1..36: mol_type = other DNA

SEQ ID NO: 2669 - DNA, 38 bp, synthetic construct; identical to SEQ ID NO: 1772
  misc_feature 1..38: note = Synthetic oligonucleotide
  source 1..38: mol_type = other DNA

SEQ ID NO: 2670 - DNA, 35 bp, synthetic construct; identical to SEQ ID NO: 2433
  misc_feature 1..35: note = Synthetic oligonucleotide
  source 1..35: mol_type = other DNA

SEQ ID NO: 2671 - DNA, 36 bp, synthetic construct; identical to SEQ ID NO: 1602
  misc_feature 1..36: note = Synthetic oligonucleotide
  source 1..36: mol_type = other DNA

SEQ ID NO: 2672 - DNA, 36 bp, synthetic construct; identical to SEQ ID NO: 1603
  misc_feature 1..36: note = Synthetic oligonucleotide
  source 1..36: mol_type = other DNA

SEQ ID NO: 2673 - DNA, 35 bp, synthetic construct; identical to SEQ ID NO: 2436
  misc_feature 1..35: note = Synthetic oligonucleotide
  source 1..35: mol_type = other DNA

SEQ ID NO: 2674 - DNA, 37 bp, synthetic construct; identical to SEQ ID NO: 2178
  misc_feature 1..37: note = Synthetic oligonucleotide
  source 1..37: mol_type = other DNA

SEQ ID NO: 2675 - DNA, 36 bp, synthetic construct; identical to SEQ ID NO: 2048
  misc_feature 1..36: note = Synthetic oligonucleotide
  source 1..36: mol_type = other DNA

SEQ ID NO: 2676 - DNA, 35 bp, synthetic construct; identical to SEQ ID NO: 1607
  misc_feature 1..35: note = Synthetic oligonucleotide
  source 1..35: mol_type = other DNA

SEQ ID NO: 2677 - DNA, 36 bp, synthetic construct; identical to SEQ ID NO: 2440
  misc_feature 1..36: note = Synthetic oligonucleotide
  source 1..36: mol_type = other DNA

SEQ ID NO: 2678 - DNA, 35 bp, synthetic construct; identical to SEQ ID NO: 2441
  misc_feature 1..35: note = Synthetic oligonucleotide
  source 1..35: mol_type = other DNA

SEQ ID NO: 2679 - DNA, 35 bp, synthetic construct; identical to SEQ ID NO: 2442
  misc_feature 1..35: note = Synthetic oligonucleotide
  source 1..35: mol_type = other DNA

SEQ ID NO: 2680 - DNA, 35 bp, synthetic construct; identical to SEQ ID NO: 2186
  misc_feature 1..35: note = Synthetic oligonucleotide
  source 1..35: mol_type = other DNA

SEQ ID NO: 2681 - DNA, 38 bp, synthetic construct; identical to SEQ ID NO: 2444
  misc_feature 1..38: note = Synthetic oligonucleotide
  source 1..38: mol_type = other DNA

SEQ ID NO: 2682 - DNA, 35 bp, synthetic construct; identical to SEQ ID NO: 2445
  misc_feature 1..35: note = Synthetic oligonucleotide
  source 1..35: mol_type = other DNA

SEQ ID NO: 2683 - DNA, 38 bp, synthetic construct; identical to SEQ ID NO: 2446
  misc_feature 1..38: note = Synthetic oligonucleotide
  source 1..38: mol_type = other DNA

SEQ ID NO: 2684 - DNA, 36 bp, synthetic construct; identical to SEQ ID NO: 1638
  misc_feature 1..36: note = Synthetic oligonucleotide
  source 1..36: mol_type = other DNA

SEQ ID NO: 2685 - DNA, 36 bp, synthetic construct; identical to SEQ ID NO: 2038
  misc_feature 1..36: note = Synthetic oligonucleotide
  source 1..36: mol_type = other DNA

SEQ ID NO: 2686 - DNA, 38 bp, synthetic construct; identical to SEQ ID NO: 1608
  misc_feature 1..38: note = Synthetic oligonucleotide
  source 1..38: mol_type = other DNA

SEQ ID NO: 2687 - DNA, 35 bp, synthetic construct; identical to SEQ ID NO: 2450
  misc_feature 1..35: note = Synthetic oligonucleotide
  source 1..35: mol_type = other DNA

SEQ ID NO: 2688 - DNA, 37 bp, synthetic construct; identical to SEQ ID NO: 1639
  misc_feature 1..37: note = Synthetic oligonucleotide
  source 1..37: mol_type = other DNA

SEQ ID NO: 2689 - DNA, 38 bp, synthetic construct; identical to SEQ ID NO: 2452
  misc_feature 1..38: note = Synthetic oligonucleotide
  source 1..38: mol_type = other DNA

SEQ ID NO: 2690 - DNA, 38 bp, synthetic construct; identical to SEQ ID NO: 2453
  misc_feature 1..38: note = Synthetic oligonucleotide
  source 1..38: mol_type = other DNA

SEQ ID NO: 2691 - DNA, 38 bp, synthetic construct; identical to SEQ ID NO: 2454
  misc_feature 1..38: note = Synthetic oligonucleotide
  source 1..38: mol_type = other DNA

SEQ ID NO: 2692 - DNA, 36 bp, synthetic construct; identical to SEQ ID NO: 2455
  misc_feature 1..36: note = Synthetic oligonucleotide
  source 1..36: mol_type = other DNA

SEQ ID NO: 2693 - DNA, 36 bp, synthetic construct; identical to SEQ ID NO: 2456
  misc_feature 1..36: note = Synthetic oligonucleotide
  source 1..36: mol_type = other DNA

SEQ ID NO: 2694 - DNA, 36 bp, synthetic construct; identical to SEQ ID NO: 1604
  misc_feature 1..36: note = Synthetic oligonucleotide
  source 1..36: mol_type = other DNA

SEQ ID NO: 2695 - DNA, 36 bp, synthetic construct; identical to SEQ ID NO: 2458
  misc_feature 1..36: note = Synthetic oligonucleotide
  source 1..36: mol_type = other DNA

SEQ ID NO: 2696 - DNA, 37 bp, synthetic construct; identical to SEQ ID NO: 2459
  misc_feature 1..37: note = Synthetic oligonucleotide
  source 1..37: mol_type = other DNA

SEQ ID NO: 2697 - DNA, 35 bp, synthetic construct; identical to SEQ ID NO: 2460
  misc_feature 1..35: note = Synthetic oligonucleotide
  source 1..35: mol_type = other DNA

SEQ ID NO: 2698 - DNA, 36 bp, synthetic construct; identical to SEQ ID NO: 2461
  misc_feature 1..36: note = Synthetic oligonucleotide
  source 1..36: mol_type = other DNA

SEQ ID NO: 2699 - DNA, 35 bp, synthetic construct; identical to SEQ ID NO: 2462
  misc_feature 1..35: note = Synthetic oligonucleotide
  source 1..35: mol_type = other DNA

SEQ ID NO: 2700 - DNA, 37 bp, synthetic construct; identical to SEQ ID NO: 2463
  misc_feature 1..37: note = Synthetic oligonucleotide
  source 1..37: mol_type = other DNA

SEQ ID NO: 2701 - DNA, 36 bp, synthetic construct; identical to SEQ ID NO: 1750
  misc_feature 1..36: note = Synthetic oligonucleotide
  source 1..36: mol_type = other DNA

SEQ ID NO: 2702 - DNA, 36 bp, synthetic construct; identical to SEQ ID NO: 2465
  misc_feature 1..36: note = Synthetic oligonucleotide
  source 1..36: mol_type = other DNA

SEQ ID NO: 2703 - DNA, 35 bp, synthetic construct; identical to SEQ ID NO: 2466
  misc_feature 1..35: note = Synthetic oligonucleotide
  source 1..35: mol_type = other DNA

SEQ ID NO: 2704 - DNA, 37 bp, synthetic construct; identical to SEQ ID NO: 2209
  misc_feature 1..37: note = Synthetic oligonucleotide
  source 1..37: mol_type = other DNA

SEQ ID NO: 2705 - DNA, 36 bp, synthetic construct; identical to SEQ ID NO: 2468
  misc_feature 1..36: note = Synthetic oligonucleotide
  source 1..36: mol_type = other DNA

SEQ ID NO: 2706 - DNA, 38 bp, synthetic construct; identical to SEQ ID NO: 1609
  misc_feature 1..38: note = Synthetic oligonucleotide
  source 1..38: mol_type = other DNA

SEQ ID NO: 2707 - DNA, 38 bp, synthetic construct; identical to SEQ ID NO: 2470
  misc_feature 1..38: note = Synthetic oligonucleotide
  source 1..38: mol_type = other DNA

SEQ ID NO: 2708 - DNA, 38 bp, synthetic construct; identical to SEQ ID NO: 2218
  misc_feature 1..38: note = Synthetic oligonucleotide
  source 1..38: mol_type = other DNA

SEQ ID NO: 2709 - DNA, 35 bp, synthetic construct; identical to SEQ ID NO: 2472
  misc_feature 1..35: note = Synthetic oligonucleotide
  source 1..35: mol_type = other DNA

SEQ ID NO: 2710 - DNA, 37 bp, synthetic construct; identical to SEQ ID NO: 2473
  misc_feature 1..37: note = Synthetic oligonucleotide
  source 1..37: mol_type = other DNA

SEQ ID NO: 2711 - DNA, 36 bp, synthetic construct; identical to SEQ ID NO: 2474
  misc_feature 1..36: note = Synthetic oligonucleotide
  source 1..36: mol_type = other DNA

SEQ ID NO: 2712 - DNA, 35 bp, synthetic construct; identical to SEQ ID NO: 1644
  misc_feature 1..35: note = Synthetic oligonucleotide
  source 1..35: mol_type = other DNA

SEQ ID NO: 2713 - DNA, 36 bp, synthetic construct; identical to SEQ ID NO: 2476
  misc_feature 1..36: note = Synthetic oligonucleotide
  source 1..36: mol_type = other DNA

SEQ ID NO: 2714 - DNA, 35 bp, synthetic construct; identical to SEQ ID NO: 2477
  misc_feature 1..35: note = Synthetic oligonucleotide
  source 1..35: mol_type = other DNA

SEQ ID NO: 2715 - DNA, 38 bp, synthetic construct; identical to SEQ ID NO: 2341
  misc_feature 1..38: note = Synthetic oligonucleotide
  source 1..38: mol_type = other DNA

SEQ ID NO: 2716 - DNA, 36 bp, synthetic construct; identical to SEQ ID NO: 2479
  misc_feature 1..36: note = Synthetic oligonucleotide
  source 1..36: mol_type = other DNA

SEQ ID NO: 2717 - DNA, 38 bp, synthetic construct; identical to SEQ ID NO: 2480
  misc_feature 1..38: note = Synthetic oligonucleotide
  source 1..38: mol_type = other DNA

SEQ ID NO: 2718 - DNA, 37 bp, synthetic construct; identical to SEQ ID NO: 2481
  misc_feature 1..37: note = Synthetic oligonucleotide
  source 1..37: mol_type = other DNA

SEQ ID NO: 2719 - DNA, 36 bp, synthetic construct; identical to SEQ ID NO: 2482
  misc_feature 1..36: note = Synthetic oligonucleotide
  source 1..36: mol_type = other DNA

SEQ ID NO: 2720 - DNA, 36 bp, synthetic construct; identical to SEQ ID NO: 2483
  misc_feature 1..36: note = Synthetic oligonucleotide
  source 1..36: mol_type = other DNA

SEQ ID NO: 2721 - DNA, 35 bp, synthetic construct; identical to SEQ ID NO: 2484
  misc_feature 1..35: note = Synthetic oligonucleotide
  source 1..35: mol_type = other DNA

SEQ ID NO: 2722 - DNA, 38 bp, synthetic construct; identical to SEQ ID NO: 2485
  misc_feature 1..38: note = Synthetic oligonucleotide
  source 1..38: mol_type = other DNA

SEQ ID NO: 2723 - DNA, 36 bp, synthetic construct; identical to SEQ ID NO: 1611
  misc_feature 1..36: note = Synthetic oligonucleotide
  source 1..36: mol_type = other DNA

SEQ ID NO: 2724 - DNA, 35 bp, synthetic construct; identical to SEQ ID NO: 2487
  misc_feature 1..35: note = Synthetic oligonucleotide
  source 1..35: mol_type = other DNA

SEQ ID NO: 2725 - DNA, 35 bp, synthetic construct; identical to SEQ ID NO: 1605
  misc_feature 1..35: note = Synthetic oligonucleotide
  source 1..35: mol_type = other DNA

SEQ ID NO: 2726 - DNA, 36 bp, synthetic construct; identical to SEQ ID NO: 2489
  misc_feature 1..36: note = Synthetic oligonucleotide
  source 1..36: mol_type = other DNA

SEQ ID NO: 2727 - DNA, 37 bp, synthetic construct; identical to SEQ ID NO: 1649
  misc_feature 1..37: note = Synthetic oligonucleotide
  source 1..37: mol_type = other DNA

SEQ ID NO: 2728 - DNA, 35 bp, synthetic construct; identical to SEQ ID NO: 1599
  misc_feature 1..35: note = Synthetic oligonucleotide
  source 1..35: mol_type = other DNA

SEQ ID NO: 2729 - DNA, 36 bp, synthetic construct
  misc_feature 1..36: note = Synthetic oligonucleotide
  source 1..36: mol_type = other DNA
aattgtgaatcacaactcctggtatataggctttga

SEQ ID NO: 2730 - DNA, 36 bp, synthetic construct
  misc_feature 1..36: note = Synthetic oligonucleotide
  source 1..36: mol_type = other DNA
cggcatacgaacctgtctcaaatcctagtaaggtaa

SEQ ID NO: 2731 - DNA, 36 bp, synthetic construct
  misc_feature 1..36: note = Synthetic oligonucleotide
  source 1..36: mol_type = other DNA
agttgtgaaacacaactcctggtatataggctttga

SEQ ID NO: 2732 - DNA, 36 bp, synthetic construct
  misc_feature 1..36: note = Synthetic oligonucleotide
  source 1..36: mol_type = other DNA
gagcttgatatcatcttccacttcttcgctattcta

SEQ ID NO: 2733 - DNA, 38 bp, synthetic construct
  misc_feature 1..38: note = Synthetic oligonucleotide
  source 1..38: mol_type = other DNA
ggtcataatgtgaatcatgaatagtactaatttactga

SEQ ID NO: 2734 - DNA, 36 bp, synthetic construct
  misc_feature 1..36: note = Synthetic oligonucleotide
  source 1..36: mol_type = other DNA
tggcggctcacgtattctgaaagttagtggtgcgga

SEQ ID NO: 2735 - DNA, 37 bp, synthetic construct
  misc_feature 1..37: note = Synthetic oligonucleotide
  source 1..37: mol_type = other DNA
tagctcatgggttgcatcctcaggataactccgctga

SEQ ID NO: 2736 - DNA, 35 bp, synthetic construct
  misc_feature 1..35: note = Synthetic oligonucleotide
  source 1..35: mol_type = other DNA
tcttattttcgcaagatcttttatctaaatacaat

SEQ ID NO: 2737 - DNA, 38 bp, synthetic construct
  misc_feature 1..38: note = Synthetic oligonucleotide
  source 1..38: mol_type = other DNA
tttcgaccattgtgggatttccggcggtccaattatga

SEQ ID NO: 2738 - DNA, 38 bp, synthetic construct
  misc_feature 1..38: note = Synthetic oligonucleotide
  source 1..38: mol_type = other DNA
actaggaagaacaggtacgtagggacacctgacagtga

SEQ ID NO: 2739 - DNA, 37 bp, synthetic construct
  misc_feature 1..37: note = Synthetic oligonucleotide
  source 1..37: mol_type = other DNA
gacagctatcaacgaccgacaacggaaattggtgtga

SEQ ID NO: 2740 - DNA, 37 bp, synthetic construct
  misc_feature 1..37: note = Synthetic oligonucleotide
  source 1..37: mol_type = other DNA
gggcgtcccttgcgttctctcaacgaatgtgtcgcga

SEQ ID NO: 2741 - DNA, 38 bp, synthetic construct
  misc_feature 1..38: note = Synthetic oligonucleotide
  source 1..38: mol_type = other DNA
tggcgggcgtgggtgttgccgagacgtcagtaccgtga

SEQ ID NO: 2742 - DNA, 37 bp, synthetic construct
  misc_feature 1..37: note = Synthetic oligonucleotide
  source 1..37: mol_type = other DNA
tggagcggcgagttggaatcctgatgtgggctcatga

SEQ ID NO: 2743 - DNA, 38 bp, synthetic construct
  misc_feature 1..38: note = Synthetic oligonucleotide
  source 1..38: mol_type = other DNA
atagataaatggggaggtcgcgcattgaatgatggtga

SEQ ID NO: 2744 - DNA, 38 bp, synthetic construct
  misc_feature 1..38: note = Synthetic oligonucleotide
  source 1..38: mol_type = other DNA
gccgtatgattaagcgatctctggcatatggcatctga

SEQ ID NO: 2745 - DNA, 38 bp, synthetic construct
  misc_feature 1..38: note = Synthetic oligonucleotide
  source 1..38: mol_type = other DNA
tctcgaagttccgtttagccccaaggtcgcgggcgtga

SEQ ID NO: 2746 - DNA, 37 bp, synthetic construct
  misc_feature 1..37: note = Synthetic oligonucleotide
  source 1..37: mol_type = other DNA
aaccgggtgtccaaaccgtaatttaatgtttctggga

SEQ ID NO: 2747 - DNA, 37 bp, synthetic construct
  misc_feature 1..37: note = Synthetic oligonucleotide
  source 1..37: mol_type = other DNA
aaccgggcgtccaaaccgtaatttaatgtttctggga

SEQ ID NO: 2748 - DNA, 35 bp, synthetic construct
  misc_feature 1..35: note = Synthetic oligonucleotide
  source 1..35: mol_type = other DNA
ataattcgcgtccggtccttggaaataaacggcgt

SEQ ID NO: 2749 - DNA, 35 bp, synthetic construct
  misc_feature 1..35: note = Synthetic oligonucleotide
  source 1..35: mol_type = other DNA
gggcggcctcgttttatcgggaaaaggaacaaagt

SEQ ID NO: 2750 - DNA, 35 bp, synthetic construct
  misc_feature 1..35: note = Synthetic oligonucleotide
  source 1..35: mol_type = other DNA
gggcggcctcgttttatcgggaaaaggaacaatat

SEQ ID NO: 2751 - DNA, 35 bp, synthetic construct
  misc_feature 1..35: note = Synthetic oligonucleotide
  source 1..35: mol_type = other DNA
gggcggcctcgttttatcgggaaaaggaacaatct

SEQ ID NO: 2752 - DNA, 36 bp, synthetic construct
  misc_feature 1..36: note = Synthetic oligonucleotide
  source 1..36: mol_type = other DNA
tggctgctggacgcgtcttacagccgaccacatcaa

SEQ ID NO: 2753 - DNA, 38 bp, synthetic construct
  misc_feature 1..38: note = Synthetic oligonucleotide
  source 1..38: mol_type = other DNA
tagccctaattgcgcttcttagcagggctcgtggttga

SEQ ID NO: 2754 - DNA, 35 bp, synthetic construct
  misc_feature 1..35: note = Synthetic oligonucleotide
  source 1..35: mol_type = other DNA
tttaggctttagggtacgacagcaataggtacaaa

SEQ ID NO: 2755 - DNA, 38 bp, synthetic construct
  misc_feature 1..38: note = Synthetic oligonucleotide
  source 1..38: mol_type = other DNA
atagataaatggggagagcgcgcattgaatgatggtga

SEQ ID NO: 2756 - DNA, 35 bp, synthetic construct
  misc_feature 1..35: note = Synthetic oligonucleotide
  source 1..35: mol_type = other DNA
gagagaagtatttgttaagccacatagttttcata

SEQ ID NO: 2757 - DNA, 35 bp, synthetic construct
  misc_feature 1..35: note = Synthetic oligonucleotide
  source 1..35: mol_type = other DNA
gagagaagtatttgttaagccacatagttttcatc

SEQ ID NO: 2758 - DNA, 36 bp, synthetic construct; identical to SEQ ID NO: 2732
  misc_feature 1..36: note = Synthetic oligonucleotide
  source 1..36: mol_type = other DNA

SEQ ID NO: 2759 - DNA, 35 bp, synthetic construct
  misc_feature 1..35: note = Synthetic oligonucleotide
  source 1..35: mol_type = other DNA
tcttattttagcaagatcttttatctaaataaact

SEQ ID NO: 2760 - DNA, 35 bp, synthetic construct
  misc_feature 1..35: note = Synthetic oligonucleotide
  source 1..35: mol_type = other DNA
tcttattttagcaagatcttttatctaaatacctt

SEQ ID NO: 2761 - DNA, 35 bp, synthetic construct
  misc_feature 1..35: note = Synthetic oligonucleotide
  source 1..35: mol_type = other DNA
tcttattttagcaagatcttttatctaaatactaa

SEQ ID NO: 2762 - DNA, 35 bp, synthetic construct
  misc_feature 1..35: note = Synthetic oligonucleotide
  source 1..35: mol_type = other DNA
tcttattttagcaagatcttttatctaaatactag

SEQ ID NO: 2763 - DNA, 37 bp, synthetic construct
  misc_feature 1..37: note = Synthetic oligonucleotide
  source 1..37: mol_type = other DNA
tgggaggttcagaagtctttggccttgatctgcagga

SEQ ID NO: 2764 - DNA, 36 bp, synthetic construct
  misc_feature 1..36: note = Synthetic oligonucleotide
  source 1..36: mol_type = other DNA
accaccaaatccccaaccacttttccgcttatccca

SEQ ID NO: 2765 - DNA, 35 bp, synthetic construct
  misc_feature 1..35: note = Synthetic oligonucleotide
  source 1..35: mol_type = other DNA
catgcagccccacaccgcttttatattgttttctc

SEQ ID NO: 2766 - DNA, 35 bp, synthetic construct
  misc_feature 1..35: note = Synthetic oligonucleotide
  source 1..35: mol_type = other DNA
catgcataggctcactcctggaacactacctttat

SEQ ID NO: 2767 - DNA, 36 bp, synthetic construct
  misc_feature 1..36: note = Synthetic oligonucleotide
  source 1..36: mol_type = other DNA
caacagtcatgtcaccctattatttgctttcattca

SEQ ID NO: 2768 - DNA, 36 bp, synthetic construct
  misc_feature 1..36: note = Synthetic oligonucleotide
  source 1..36: mol_type = other DNA
catgccatatgtcccatcacttacctaccatcccta

SEQ ID NO: 2769 - DNA, 35 bp, synthetic construct
  misc_feature 1..35: note = Synthetic oligonucleotide
  source 1..35: mol_type = other DNA
catgcgatccaatcctatagtccttggaccttata

SEQ ID NO: 2770 - DNA, 35 bp, synthetic construct
  misc_feature 1..35: note = Synthetic oligonucleotide
  source 1..35: mol_type = other DNA
catgcgatccctcacacaactttcatcccaatacc

SEQ ID NO: 2771 - DNA, 35 bp, synthetic construct
  misc_feature 1..35: note = Synthetic oligonucleotide
  source 1..35: mol_type = other DNA
cttgcgatattaactttccatcactttccttcttt

SEQ ID NO: 2772 - DNA, 35 bp, synthetic construct
  misc_feature 1..35: note = Synthetic oligonucleotide
  source 1..35: mol_type = other DNA
catgcgccgatacccatttcccaattcctcttcaa

SEQ ID NO: 2773 - DNA, 35 bp, synthetic construct
  misc_feature 1..35: note = Synthetic oligonucleotide
  source 1..35: mol_type = other DNA
cactgccacgtcaaatgcctctttcatttccattt

SEQ ID NO: 2774 - DNA, 36 bp, synthetic construct
  misc_feature 1..36: note = Synthetic oligonucleotide
  source 1..36: mol_type = other DNA
cactgcggtcgagcctcctaattgttctcaccctta

SEQ ID NO: 2775 - DNA, 38 bp, synthetic construct
  misc_feature 1..38: note = Synthetic oligonucleotide
  source 1..38: mol_type = other DNA
cgaacagtggtacacgacgtagtgcactctttttatga

SEQ ID NO: 2776 - DNA, 35 bp, synthetic construct
  misc_feature 1..35: note = Synthetic oligonucleotide
  source 1..35: mol_type = other DNA
attgatctgcatgtgccattttcccacctttgttt

SEQ ID NO: 2777 - DNA, 35 bp, synthetic construct
  misc_feature 1..35: note = Synthetic oligonucleotide
  source 1..35: mol_type = other DNA
gcacatgcgtactctcattaacttcattaccatcc

SEQ ID NO: 2778 - DNA, 35 bp, synthetic construct
  misc_feature 1..35: note = Synthetic oligonucleotide
  source 1..35: mol_type = other DNA
gcgattacccactcttgtaaactaatttgcccatt

SEQ ID NO: 2779 - DNA, 38 bp, synthetic construct
  misc_feature 1..38: note = Synthetic oligonucleotide
  source 1..38: mol_type = other DNA
gagacacgccactctcacgacacgttccttatttctga

SEQ ID NO: 2780 - DNA, 35 bp, synthetic construct; identical to SEQ ID NO: 452
  misc_feature 1..35: note = Synthetic oligonucleotide
  source 1..35: mol_type = other DNA

SEQ ID NO: 2781 - DNA, 34 bp, synthetic construct
  misc_feature 1..34: note = Synthetic oligonucleotide
  source 1..34: mol_type = other DNA
gccacaacacaattcttccgccatcactgcccaa

SEQ ID NO: 2782 - DNA, 35 bp, synthetic construct
  misc_feature 1..35: note = Synthetic oligonucleotide
  source 1..35: mol_type = other DNA
gcctgaccacccgtataatttaccgcctaaacctt

SEQ ID NO: 2783 - DNA, 34 bp, synthetic construct; identical to SEQ ID NO: 161
  misc_feature 1..34: note = Synthetic oligonucleotide
  source 1..34: mol_type = other DNA

SEQ ID NO: 2784 - DNA, 36 bp, synthetic construct
  misc_feature 1..36: note = Synthetic oligonucleotide
  source 1..36: mol_type = other DNA
tacgactcatacttccattccgcctaaccttttcca

SEQ ID NO: 2785 - DNA, 35 bp, synthetic construct
  misc_feature 1..35: note = Synthetic oligonucleotide
  source 1..35: mol_type = other DNA
gcgtatcaccatggctcacttttcctatctccttt

SEQ ID NO: 2786 - DNA, 35 bp, synthetic construct
  misc_feature 1..35: note = Synthetic oligonucleotide
  source 1..35: mol_type = other DNA
ggccacgtaacagctactcaacgcgcaacactaac

SEQ ID NO: 2787 - DNA, 36 bp, synthetic construct
  misc_feature 1..36: note = Synthetic oligonucleotide
  source 1..36: mol_type = other DNA
gcggccacactttgccttcttattcgttaattccta

SEQ ID NO: 2788 - DNA, 35 bp, synthetic construct
  misc_feature 1..35: note = Synthetic oligonucleotide
  source 1..35: mol_type = other DNA
tgctgtcaacgcgaagatctttctcttttattctt

SEQ ID NO: 2789 - DNA, 35 bp, synthetic construct
  misc_feature 1..35: note = Synthetic oligonucleotide
  source 1..35: mol_type = other DNA
tatgcggcgaacgccttctatttcctggttctctt

SEQ ID NO: 2790 - DNA, 35 bp, synthetic construct
  misc_feature 1..35: note = Synthetic oligonucleotide
  source 1..35: mol_type = other DNA
tatgccccacgataatttcctctttttgcatattt

SEQ ID NO: 2791 - DNA, 36 bp, synthetic construct; identical to SEQ ID NO: 570
  misc_feature 1..36: note = Synthetic oligonucleotide
  source 1..36: mol_type = other DNA

SEQ ID NO: 2792 - DNA, 36 bp, synthetic construct
  misc_feature 1..36: note = Synthetic oligonucleotide
  source 1..36: mol_type = other DNA
acaccacgcctctgccggtggacgtactgcccatta

SEQ ID NO: 2793 - DNA, 38 bp, synthetic construct
  misc_feature 1..38: note = Synthetic oligonucleotide
  source 1..38: mol_type = other DNA
gccacgtagaacacccatcctgatccatacaatactga

SEQ ID NO: 2794 - DNA, 35 bp, synthetic construct; identical to SEQ ID NO: 778
  misc_feature 1..35: note = Synthetic oligonucleotide
  source 1..35: mol_type = other DNA

SEQ ID NO: 2795 - DNA, 36 bp, synthetic construct
  misc_feature 1..36: note = Synthetic oligonucleotide
  source 1..36: mol_type = other DNA
acgcacgtgcagtcgtatcccgtttcttgcgcttta

SEQ ID NO: 2796 - DNA, 35 bp, synthetic construct
  misc_feature 1..35: note = Synthetic oligonucleotide
  source 1..35: mol_type = other DNA
gacctagaagagggcgcttaaaattgggagtggtt

SEQ ID NO: 2797 - DNA, 35 bp, synthetic construct
  misc_feature 1..35: note = Synthetic oligonucleotide
  source 1..35: mol_type = other DNA
atgcactacgcagatgcaaactatctttcgccttc

SEQ ID NO: 2798 - DNA, 35 bp, synthetic construct; identical to SEQ ID NO: 429
  misc_feature 1..35: note = Synthetic oligonucleotide
  source 1..35: mol_type = other DNA

SEQ ID NO: 2799 - DNA, 38 bp, synthetic construct
  misc_feature 1..38: note = Synthetic oligonucleotide
  source 1..38: mol_type = other DNA
gatgtagctgccacgagtgcgtatactcctttatctga

SEQ ID NO: 2800 - DNA, 36 bp, synthetic construct
  misc_feature 1..36: note = Synthetic oligonucleotide
  source 1..36: mol_type = other DNA
gcccagctgcggtcacttgcccagccattccaccaa

SEQ ID NO: 2801 - DNA, 35 bp, synthetic construct; identical to SEQ ID NO: 452
  misc_feature 1..35: note = Synthetic oligonucleotide
  source 1..35: mol_type = other DNA

SEQ ID NO: 2802 - DNA, 34 bp, synthetic construct; identical to SEQ ID NO: 161
  misc_feature 1..34: note = Synthetic oligonucleotide
  source 1..34: mol_type = other DNA

SEQ ID NO: 2803 - DNA, 35 bp, synthetic construct
  misc_feature 1..35: note = Synthetic oligonucleotide
  source 1..35: mol_type = other DNA
gccgagtcaatcaagctcggattacagtgtttacc

SEQ ID NO: 2804 - DNA, 35 bp, synthetic construct
  misc_feature 1..35: note = Synthetic oligonucleotide
  source 1..35: mol_type = other DNA
tactgcaggtacagagtatcttcatccacctccat

SEQ ID NO: 2805 - DNA, 36 bp, synthetic construct
  misc_feature 1..36: note = Synthetic oligonucleotide
  source 1..36: mol_type = other DNA
ggtgccgttgaggtatacggaccgtgcaggccatca

SEQ ID NO: 2806 - DNA, 36 bp, synthetic construct; identical to SEQ ID NO: 706
  misc_feature 1..36: note = Synthetic oligonucleotide
  source 1..36: mol_type = other DNA

SEQ ID NO: 2807 - DNA, 35 bp, synthetic construct
  misc_feature 1..35: note = Synthetic oligonucleotide
  source 1..35: mol_type = other DNA
gtcgtgcgaggtcaagtactcctattctctctaaa

SEQ ID NO: 2808 - DNA, 38 bp, synthetic construct
  misc_feature 1..38: note = Synthetic oligonucleotide
  source 1..38: mol_type = other DNA
tggagggccgagtggtgggggtttgagaagcattatga

SEQ ID NO: 2809 - DNA, 37 bp, synthetic construct
  misc_feature 1..37: note = Synthetic oligonucleotide
  source 1..37: mol_type = other DNA
tcacgacgtacaaaggttggcgtacttaccttactga

SEQ ID NO: 2810 - DNA, 35 bp, synthetic construct
  misc_feature 1..35: note = Synthetic oligonucleotide
  source 1..35: mol_type = other DNA
tgcactgtaggtcatttcgtttacttgccaccatc

SEQ ID NO: 2811 - DNA, 36 bp, synthetic construct
  misc_feature 1..36: note = Synthetic oligonucleotide
  source 1..36: mol_type = other DNA
tgtaacagcagtcgcggggaattattggctcttgaa

SEQ ID NO: 2812 - DNA, 36 bp, synthetic construct
  misc_feature 1..36: note = Synthetic oligonucleotide
  source 1..36: mol_type = other DNA
tgtacaagtcagacgcgcccaaccctgtttacacta

SEQ ID NO: 2813 - DNA, 38 bp, synthetic construct
  misc_feature 1..38: note = Synthetic oligonucleotide
  source 1..38: mol_type = other DNA
tgtacacctgcaatgcgtggtattactttgttccttga

SEQ ID NO: 2814 - DNA, 38 bp, synthetic construct
  misc_feature 1..38: note = Synthetic oligonucleotide
  source 1..38: mol_type = other DNA
tccacatgccgttgaactctttattccctttaccttga

SEQ ID NO: 2815 - DNA, 35 bp, synthetic construct
  misc_feature 1..35: note = Synthetic oligonucleotide
  source 1..35: mol_type = other DNA
ttggtacccgatagaatctagtttttgtagccaag

SEQ ID NO: 2816 - DNA, 35 bp, synthetic construct
  misc_feature 1..35: note = Synthetic oligonucleotide
  source 1..35: mol_type = other DNA
acggacatgcgagcaacaatgaacgtctttttttc

SEQ ID NO: 2817 - DNA, 36 bp, synthetic construct
  misc_feature 1..36: note = Synthetic oligonucleotide
  source 1..36: mol_type = other DNA
aaccacgaaggtacggacacactttacataccctta

SEQ ID NO: 2818 - DNA, 38 bp, synthetic construct
  misc_feature 1..38: note = Synthetic oligonucleotide
  source 1..38: mol_type = other DNA
atgtacgcggtacccatcacacactatgtgtcccttga

SEQ ID NO: 2819 - DNA, 35 bp, synthetic construct
  misc_feature 1..35: note = Synthetic oligonucleotide
  source 1..35: mol_type = other DNA
agtcacacaagcctccgattcattcttctaaacat

SEQ ID NO: 2820 - DNA, 38 bp, synthetic construct
  misc_feature 1..38: note = Synthetic oligonucleotide
  source 1..38: mol_type = other DNA
catgcgcaggtatcttgctacactattctcccgtttga

SEQ ID NO: 2821 - DNA, 36 bp, synthetic construct
  misc_feature 1..36: note = Synthetic oligonucleotide
  source 1..36: mol_type = other DNA
atgcgcacccgctatctacccgtgacacacgcctta

SEQ ID NO: 2822 - DNA, 35 bp, synthetic construct
  misc_feature 1..35: note = Synthetic oligonucleotide
  source 1..35: mol_type = other DNA
atctcgaaccaccaccttccatcccttatgttgtc

SEQ ID NO: 2823 - DNA, 35 bp, synthetic construct
  misc_feature 1..35: note = Synthetic oligonucleotide
  source 1..35: mol_type = other DNA
gcgaaccggaacttaatatccttgtaaccgctatc

SEQ ID NO: 2824 - DNA, 36 bp, synthetic construct
  misc_feature 1..36: note = Synthetic oligonucleotide
  source 1..36: mol_type = other DNA
gcaacccgacctcgctccaaccgcttacgactccta

SEQ ID NO: 2825 - DNA, 36 bp, synthetic construct
  misc_feature 1..36: note = Synthetic oligonucleotide
  source 1..36: mol_type = other DNA
gcaccccacatcccacgatcccatggatacccgcca

SEQ ID NO: 2826 - DNA, 36 bp, synthetic construct
  misc_feature 1..36: note = Synthetic oligonucleotide
  source 1..36: mol_type = other DNA
gccaacctcaccaccggtacgccttatcgctaatta

SEQ ID NO: 2827 - DNA, 35 bp, synthetic construct
  misc_feature 1..35: note = Synthetic oligonucleotide
  source 1..35: mol_type = other DNA
tcagtaccgccattcccaaaaatttttccccaaca

SEQ ID NO: 2828 - DNA, 35 bp, synthetic construct
  misc_feature 1..35: note = Synthetic oligonucleotide
  source 1..35: mol_type = other DNA
tgaagccagctgacgtacatccacatattccctac

SEQ ID NO: 2829 - DNA, 36 bp, synthetic construct
  misc_feature 1..36: note = Synthetic oligonucleotide
  source 1..36: mol_type = other DNA
tcaaccaactcaccctcatttactcgcataacatta

SEQ ID NO: 2830 - DNA, 35 bp, synthetic construct
  misc_feature 1..35: note = Synthetic oligonucleotide
  source 1..35: mol_type = other DNA
tatgcccgcctgactctcttattactggttccgac

SEQ ID NO: 2831 - DNA, 36 bp, synthetic construct
  misc_feature 1..36: note = Synthetic oligonucleotide
  source 1..36: mol_type = other DNA
actgctggcaccgcaatctacctaaagtttccgtta

SEQ ID NO: 2832 - DNA, 35 bp, synthetic construct
  misc_feature 1..35: note = Synthetic oligonucleotide
  source 1..35: mol_type = other DNA
accacgcactcaggttcatgcatcttgaactttac

SEQ ID NO: 2833 - DNA, 36 bp, synthetic construct
  misc_feature 1..36: note = Synthetic oligonucleotide
  source 1..36: mol_type = other DNA
gaccgtcgcaggccgtggctagcaggacgttggcta

SEQ ID NO: 2834 - DNA, 38 bp, synthetic construct
  misc_feature 1..38: note = Synthetic oligonucleotide
  source 1..38: mol_type = other DNA
gacgaacgtgctgttggtattttttgaactcttattga

SEQ ID NO: 2835 - DNA, 37 bp, synthetic construct
  misc_feature 1..37: note = Synthetic oligonucleotide
  source 1..37: mol_type = other DNA
gacatcctggaggtcctaactgcggtctcacacttga

SEQ ID NO: 2836 - DNA, 35 bp, synthetic construct
  misc_feature 1..35: note = Synthetic oligonucleotide
  source 1..35: mol_type = other DNA
atgccggggtcacgacgttaccgcactccatctat

SEQ ID NO: 2837 - DNA, 35 bp, synthetic construct
  misc_feature 1..35: note = Synthetic oligonucleotide
  source 1..35: mol_type = other DNA
atcagcaacgcccagtggtgcaagctttacccttt

SEQ ID NO: 2838 - DNA, 36 bp, synthetic construct
  misc_feature 1..36: note = Synthetic oligonucleotide
  source 1..36: mol_type = other DNA
gactaccgtacgtgcatggcccccagttacacaata

SEQ ID NO: 2839 - DNA, 35 bp, synthetic construct
  misc_feature 1..35: note = Synthetic oligonucleotide
  source 1..35: mol_type = other DNA
tacctcaaccgcgaactttgctacgttttgtaggg

SEQ ID NO: 2840 - DNA, 35 bp, synthetic construct
  misc_feature 1..35: note = Synthetic oligonucleotide
  source 1..35: mol_type = other DNA
tacgctgtcgtgtgaggccctaccgctcccctatc

SEQ ID NO: 2841 - DNA, 35 bp, synthetic construct
  misc_feature 1..35: note = Synthetic oligonucleotide
  source 1..35: mol_type = other DNA
gtcacggaagcagttacgaacgatgcccttccatc

SEQ ID NO: 2842 - DNA, 36 bp, synthetic construct; identical to SEQ ID NO: 2811
  misc_feature 1..36: note = Synthetic oligonucleotide
  source 1..36: mol_type = other DNA

SEQ ID NO: 2843 - DNA, 35 bp, synthetic construct
  misc_feature 1..35: note = Synthetic oligonucleotide
  source 1..35: mol_type = other DNA
ttgtgacgtctcgtgcgcattaccggttaatattt

SEQ ID NO: 2844 - DNA, 35 bp, synthetic construct; identical to SEQ ID NO: 2815
  misc_feature 1..35: note = Synthetic oligonucleotide
  source 1..35: mol_type = other DNA

SEQ ID NO: 2845 - DNA, 35 bp, synthetic construct
  misc_feature 1..35: note = Synthetic oligonucleotide
  source 1..35: mol_type = other DNA
tttaacgtagtgagtcaccattgatcctttaattt

SEQ ID NO: 2846 - DNA, 35 bp, synthetic construct
  misc_feature 1..35: note = Synthetic oligonucleotide
  source 1..35: mol_type = other DNA
acccacgcctaccctaatccttgtctgttattttc

SEQ ID NO: 2847 - DNA, 36 bp, synthetic construct
  misc_feature 1..36: note = Synthetic oligonucleotide
  source 1..36: mol_type = other DNA
catgccgaataatctctttcgttcctggtcctttta

SEQ ID NO: 2848 - DNA, 37 bp, synthetic construct
  misc_feature 1..37: note = Synthetic oligonucleotide
  source 1..37: mol_type = other DNA
catgccgccaaaccacactgttccgtcttacttatga

SEQ ID NO: 2849 - DNA, 35 bp, synthetic construct
  misc_feature 1..35: note = Synthetic oligonucleotide
  source 1..35: mol_type = other DNA
catgcgaacaacctttaccattcactagcacccct

SEQ ID NO: 2850 - DNA, 38 bp, synthetic construct
  misc_feature 1..38: note = Synthetic oligonucleotide
  source 1..38: mol_type = other DNA
catgcgacacgctctatcgctttcacatcttcgcttga

SEQ ID NO: 2851 - DNA, 35 bp, synthetic construct; identical to SEQ ID NO: 2770
  misc_feature 1..35: note = Synthetic oligonucleotide
  source 1..35: mol_type = other DNA

SEQ ID NO: 2852 - DNA, 35 bp, synthetic construct
  misc_feature 1..35: note = Synthetic oligonucleotide
  source 1..35: mol_type = other DNA
catgcgcactttcctcacatgataccctgcatgac

SEQ ID NO: 2853 - DNA, 35 bp, synthetic construct
  misc_feature 1..35: note = Synthetic oligonucleotide
  source 1..35: mol_type = other DNA
catgcgcatccaatcacactttttaatttcatttc

SEQ ID NO: 2854 - DNA, 35 bp, synthetic construct
  misc_feature 1..35: note = Synthetic oligonucleotide
  source 1..35: mol_type = other DNA
atgcctagcagccaagcaatgcctttcatttattc

SEQ ID NO: 2855 - DNA, 36 bp, synthetic construct
  misc_feature 1..36: note = Synthetic oligonucleotide
  source 1..36: mol_type = other DNA
gccgcagccatcatctacgcttcacactcatcacca

SEQ ID NO: 2856 - DNA, 36 bp, synthetic construct
  misc_feature 1..36: note = Synthetic oligonucleotide
  source 1..36: mol_type = other DNA
ggtacgcaggcgcgatttgtacatttttgatcctga

SEQ ID NO: 2857 - DNA, 38 bp, synthetic construct
  misc_feature 1..38: note = Synthetic oligonucleotide
  source 1..38: mol_type = other DNA
tctaacgtactatcatgtgccacgccttcatttcctga

SEQ ID NO: 2858 - DNA, 35 bp, synthetic construct
  misc_feature 1..35: note = Synthetic oligonucleotide
  source 1..35: mol_type = other DNA
tcaactgccaccgaccccaacccgcgacccatcct

SEQ ID NO: 2859 - DNA, 36 bp, synthetic construct; identical to SEQ ID NO: 368
  misc_feature 1..36: note = Synthetic oligonucleotide
  source 1..36: mol_type = other DNA

SEQ ID NO: 2860 - DNA, 36 bp, synthetic construct
  misc_feature 1..36: note = Synthetic oligonucleotide
  source 1..36: mol_type = other DNA
cgcgagccagggtactgcctgcggtctaaacaataa

SEQ ID NO: 2861 - DNA, 36 bp, synthetic construct; identical to SEQ ID NO: 151
  misc_feature 1..36: note = Synthetic oligonucleotide
  source 1..36: mol_type = other DNA

SEQ ID NO: 2862 - DNA, 35 bp, synthetic construct; identical to SEQ ID NO: 326
  misc_feature 1..35: note = Synthetic oligonucleotide
  source 1..35: mol_type = other DNA

SEQ ID NO: 2863 - DNA, 35 bp, synthetic construct; identical to SEQ ID NO: 181
  misc_feature 1..35: note = Synthetic oligonucleotide
  source 1..35: mol_type = other DNA

SEQ ID NO: 2864 - DNA, 38 bp, synthetic construct; identical to SEQ ID NO: 852
  misc_feature 1..38: note = Synthetic oligonucleotide
  source 1..38: mol_type = other DNA

SEQ ID NO: 2865 - DNA, 36 bp, synthetic construct; identical to SEQ ID NO: 184
  misc_feature 1..36: note = Synthetic oligonucleotide
  source 1..36: mol_type = other DNA

SEQ ID NO: 2866 - DNA, 36 bp, synthetic construct
  misc_feature 1..36: note = Synthetic oligonucleotide
  source 1..36: mol_type = other DNA
tgggtgtcgtactggtaccaaggagtgcgaaatcta

SEQ ID NO: 2867 - DNA, 35 bp, synthetic construct; identical to SEQ ID NO: 272
  misc_feature 1..35: note = Synthetic oligonucleotide
  source 1..35: mol_type = other DNA

SEQ ID NO: 2868 - DNA, 35 bp, synthetic construct
  misc_feature 1..35: note = Synthetic oligonucleotide
  source 1..35: mol_type = other DNA
acgcgcataaaccaatcactaccgaccacttattc

SEQ ID NO: 2869 - DNA, 35 bp, synthetic construct
  misc_feature 1..35: note = Synthetic oligonucleotide
  source 1..35: mol_type = other DNA
acgtcaggcataaattcttcaaactcttactatca

SEQ ID NO: 2870 - DNA, 36 bp, synthetic construct
  misc_feature 1..36: note = Synthetic oligonucleotide
  source 1..36: mol_type = other DNA
catgcccggaccattattattcgcttaccattccca

SEQ ID NO: 2871 - DNA, 37 bp, synthetic construct
  misc_feature 1..37: note = Synthetic oligonucleotide
  source 1..37: mol_type = other DNA
catgccgaccactgttccttttacctcttatacctga

SEQ ID NO: 2872 - DNA, 35 bp, synthetic construct
  misc_feature 1..35: note = Synthetic oligonucleotide
  source 1..35: mol_type = other DNA
catgcgaacagacgaatgattcttacaaccgcaac

SEQ ID NO: 2873 - DNA, 35 bp, synthetic construct
  misc_feature 1..35: note = Synthetic oligonucleotide
  source 1..35: mol_type = other DNA
cccgtccgcaggcatccacgtttatgccttttatc

SEQ ID NO: 2874 - DNA, 36 bp, synthetic construct
  misc_feature 1..36: note = Synthetic oligonucleotide
  source 1..36: mol_type = other DNA
cacgcgaccctcattaacatcatctaacccaatcca

SEQ ID NO: 2875 - DNA, 35 bp, synthetic construct
  misc_feature 1..35: note = Synthetic oligonucleotide
  source 1..35: mol_type = other DNA
catgcgccaattttactgtacatttctttttttat

SEQ ID NO: 2876 - DNA, 35 bp, synthetic construct
  misc_feature 1..35: note = Synthetic oligonucleotide
  source 1..35: mol_type = other DNA
catgcgcgccgacctactcgcttaatctcacgttt

SEQ ID NO: 2877 - DNA, 35 bp, synthetic construct
  misc_feature 1..35: note = Synthetic oligonucleotide
  source 1..35: mol_type = other DNA
catggcgaccctcaatctcacattttacctcttct

SEQ ID NO: 2878 - DNA, 35 bp, synthetic construct
  misc_feature 1..35: note = Synthetic oligonucleotide
  source 1..35: mol_type = other DNA
gacggactgcgtatcgcatagtttatccttttttt

SEQ ID NO: 2879 - DNA, 35 bp, synthetic construct
  misc_feature 1..35: note = Synthetic oligonucleotide
  source 1..35: mol_type = other DNA
gcccaccatatcgcaatcatattcctcgccttgtt

SEQ ID NO: 2880 - DNA, 35 bp, synthetic construct
  misc_feature 1..35: note = Synthetic oligonucleotide
  source 1..35: mol_type = other DNA
gcgcatgtcaaccttacctctattggcccttattc

SEQ ID NO: 2881 - DNA, 35 bp, synthetic construct
  misc_feature 1..35: note = Synthetic oligonucleotide
  source 1..35: mol_type = other DNA
gcatccagtccataactcaatctcacctgtaattc

SEQ ID NO: 2882 - DNA, 35 bp, synthetic construct
  misc_feature 1..35: note = Synthetic oligonucleotide
  source 1..35: mol_type = other DNA
gccgcatacccctgtaatttcgtaacctacaccca

SEQ ID NO: 2883 - DNA, 34 bp, synthetic construct
  misc_feature 1..34: note = Synthetic oligonucleotide
  source 1..34: mol_type = other DNA
gcgcaactccgactatcactgccttaccaatcac

SEQ ID NO: 2884 - DNA, 36 bp, synthetic construct
  misc_feature 1..36: note = Synthetic oligonucleotide
  source 1..36: mol_type = other DNA
gcgacgcctctgacctacatataactttgatagtaa

SEQ ID NO: 2885 - DNA, 35 bp, synthetic construct
  misc_feature 1..35: note = Synthetic oligonucleotide
  source 1..35: mol_type = other DNA
gcgacgcgtgaacacccttattctgtaatcttttt

SEQ ID NO: 2886 - DNA, 35 bp, synthetic construct
  misc_feature 1..35: note = Synthetic oligonucleotide
  source 1..35: mol_type = other DNA
gtactgtcaacccgatctttgtttgtatttatttt

SEQ ID NO: 2887 - DNA, 38 bp, synthetic construct
  misc_feature 1..38: note = Synthetic oligonucleotide
  source 1..38: mol_type = other DNA
gcgcggtactcattatccttatatcatcttacatttga

SEQ ID NO: 2888 - DNA, 37 bp, synthetic construct
  misc_feature 1..37: note = Synthetic oligonucleotide
  source 1..37: mol_type = other DNA
tatgcgagcccatttttcacctttgctatttcttaga

SEQ ID NO: 2889 - DNA, 35 bp, synthetic construct
  misc_feature 1..35: note = Synthetic oligonucleotide
  source 1..35: mol_type = other DNA
tcctccagcacattctaccacactaccacattcat

SEQ ID NO: 2890 - DNA, 35 bp, synthetic construct
  misc_feature 1..35: note = Synthetic oligonucleotide
  source 1..35: mol_type = other DNA
tatgcggtgccacttctctattacttctattactt

SEQ ID NO: 2891 - DNA, 36 bp, synthetic construct
  misc_feature 1..36: note = Synthetic oligonucleotide
  source 1..36: mol_type = other DNA
tcatgcagcctagtatctatcctaccatattattca

SEQ ID NO: 2892 - DNA, 35 bp, synthetic construct
  misc_feature 1..35: note = Synthetic oligonucleotide
  source 1..35: mol_type = other DNA
tgacggacagtgcatgcgttatacttattctctat

SEQ ID NO: 2893 - DNA, 38 bp, synthetic construct
  misc_feature 1..38: note = Synthetic oligonucleotide
  source 1..38: mol_type = other DNA
aagcctggccgtggtgctgcagtttattccgttagtga

SEQ ID NO: 2894 - DNA, 36 bp, synthetic construct; identical to SEQ ID NO: 2860
  misc_feature 1..36: note = Synthetic oligonucleotide
  source 1..36: mol_type = other DNA

SEQ ID NO: 2895 - DNA, 36 bp, synthetic construct; identical to SEQ ID NO: 151
  misc_feature 1..36: note = Synthetic oligonucleotide
  source 1..36: mol_type = other DNA

SEQ ID NO: 2896 - DNA, 36 bp, synthetic construct
  misc_feature 1..36: note = Synthetic oligonucleotide
  source 1..36: mol_type = other DNA
gcattcgcgtactgtggacaacctatatccgggtaa

SEQ ID NO: 2897 - DNA, 36 bp, synthetic construct
  misc_feature 1..36: note = Synthetic oligonucleotide
  source 1..36: mol_type = other DNA
gcaactatcgcgagcgccttcaagattagcgtgtca

SEQ ID NO: 2898 - DNA, 38 bp, synthetic construct; identical to SEQ ID NO: 169
  misc_feature 1..38: note = Synthetic oligonucleotide
  source 1..38: mol_type = other DNA

SEQ ID NO: 2899 - DNA, 38 bp, synthetic construct
  misc_feature 1..38: note = Synthetic oligonucleotide
  source 1..38: mol_type = other DNA
gtgcggggccacaggtgatagcaatgcatgccctatga

SEQ ID NO: 2900 - DNA, 37 bp, synthetic construct
  misc_feature 1..37: note = Synthetic oligonucleotide
  source 1..37: mol_type = other DNA
tcaccccaagcagtcattgcctacaggagtctggtga

SEQ ID NO: 2901 - DNA, 37 bp, synthetic construct
  misc_feature 1..37: note = Synthetic oligonucleotide
  source 1..37: mol_type = other DNA
tgcagttagtgcaatgaatatctcggacacgcggaga

SEQ ID NO: 2902 - DNA, 35 bp, synthetic construct
  misc_feature 1..35: note = Synthetic oligonucleotide
  source 1..35: mol_type = other DNA
tccgcagacagccgggggtcaggactacggctacg

SEQ ID NO: 2903 - DNA, 37 bp, synthetic construct
  misc_feature 1..37: note = Synthetic oligonucleotide
  source 1..37: mol_type = other DNA
ttacagctactctgcgctccaagtggacactttacga

SEQ ID NO: 2904 - DNA, 36 bp, synthetic construct
  misc_feature 1..36: note = Synthetic oligonucleotide
  source 1..36: mol_type = other DNA
ttagcatcactgacttggatacatacagcatgtcga

SEQ ID NO: 2905 - DNA, 35 bp, synthetic construct
  misc_feature 1..35: note = Synthetic oligonucleotide
  source 1..35: mol_type = other DNA
agcacgactgcaatccacatccgttcttattcctt

SEQ ID NO: 2906 - DNA, 37 bp, synthetic construct
  misc_feature 1..37: note = Synthetic oligonucleotide
  source 1..37: mol_type = other DNA
aatgcgcacatctgtttttgtaccttagaatgtttga

SEQ ID NO: 2907 - DNA, 35 bp, synthetic construct; identical to SEQ ID NO: 2869
  misc_feature 1..35: note = Synthetic oligonucleotide
  source 1..35: mol_type = other DNA

SEQ ID NO: 2908 - DNA, 36 bp, synthetic construct
  misc_feature 1..36: note = Synthetic oligonucleotide
  source 1..36: mol_type = other DNA
catgcaccactcgcacattccaccacaatctataca

SEQ ID NO: 2909 - DNA, 35 bp, synthetic construct
  misc_feature 1..35: note = Synthetic oligonucleotide
  source 1..35: mol_type = other DNA
ctgccactagccgcccatactatccacaccataat

SEQ ID NO: 2910 - DNA, 35 bp, synthetic construct
  misc_feature 1..35: note = Synthetic oligonucleotide
  source 1..35: mol_type = other DNA
ccatgcgcggtcacacataccagtccttaccattt

SEQ ID NO: 2911 - DNA, 35 bp, synthetic construct
  misc_feature 1..35: note = Synthetic oligonucleotide
  source 1..35: mol_type = other DNA
catgccgacacaccacttttttccgaccgacttcc

SEQ ID NO: 2912 - DNA, 35 bp, synthetic construct
  misc_feature 1..35: note = Synthetic oligonucleotide
  source 1..35: mol_type = other DNA
catgccgcctttcgacttccatatcccaacacgac

SEQ ID NO: 2913 - DNA, 35 bp, synthetic construct; identical to SEQ ID NO: 194
  misc_feature 1..35: note = Synthetic oligonucleotide
  source 1..35: mol_type = other DNA

SEQ ID NO: 2914 - DNA, 35 bp, synthetic construct; identical to SEQ ID NO: 195
  misc_feature 1..35: note = Synthetic oligonucleotide
  source 1..35: mol_type = other DNA

SEQ ID NO: 2915 - DNA, 35 bp, synthetic construct
  misc_feature 1..35: note = Synthetic oligonucleotide
  source 1..35: mol_type = other DNA
cttgccgatcccgctccctagttcccttgcccact

SEQ ID NO: 2916 - DNA, 36 bp, synthetic construct
  misc_feature 1..36: note = Synthetic oligonucleotide
  source 1..36: mol_type = other DNA
cacgcatgtctgcgctcgtatcttttcaccctatga

SEQ ID NO: 2917 - DNA, 38 bp, synthetic construct
  misc_feature 1..38: note = Synthetic oligonucleotide
  source 1..38: mol_type = other DNA
cactgcggtcaacacccaccaacctccgaccttactga

SEQ ID NO: 2918 - DNA, 38 bp, synthetic construct
  misc_feature 1..38: note = Synthetic oligonucleotide
  source 1..38: mol_type = other DNA
catgcgtacgccactttcgcctactctaacatatctga

SEQ ID NO: 2919 - DNA, 35 bp, synthetic construct
  misc_feature 1..35: note = Synthetic oligonucleotide
  source 1..35: mol_type = other DNA
cagtctgcgcgaccctttctgttccttcatcccca

SEQ ID NO: 2920 - DNA, 35 bp, synthetic construct
  misc_feature 1..35: note = Synthetic oligonucleotide
  source 1..35: mol_type = other DNA
cattgcgccttctattttattttccttatatttgt

SEQ ID NO: 2921 - DNA, 38 bp, synthetic construct
  misc_feature 1..38: note = Synthetic oligonucleotide
  source 1..38: mol_type = other DNA
cattgcggccattacccctctaccgttaccctttttga

SEQ ID NO: 2922 - DNA, 35 bp, synthetic construct
  misc_feature 1..35: note = Synthetic oligonucleotide
  source 1..35: mol_type = other DNA
gcacacacctgcggagcaccactccaaattaccca

SEQ ID NO: 2923 - DNA, 35 bp, synthetic construct
  misc_feature 1..35: note = Synthetic oligonucleotide
  source 1..35: mol_type = other DNA
gcacactacgtttaccctggcccttctaattgttt

SEQ ID NO: 2924 - DNA, 35 bp, synthetic construct
  misc_feature 1..35: note = Synthetic oligonucleotide
  source 1..35: mol_type = other DNA
gcactgccattgatttcttcccacttcacactctt

SEQ ID NO: 2925 - DNA, 36 bp, synthetic construct
  misc_feature 1..36: note = Synthetic oligonucleotide
  source 1..36: mol_type = other DNA
gcgaacactgatcttaactaacgcccgcccaattta

SEQ ID NO: 2926 - DNA, 36 bp, synthetic construct
  misc_feature 1..36: note = Synthetic oligonucleotide
  source 1..36: mol_type = other DNA
gcacccccaatgaccgccatcaaaccatatattcca

SEQ ID NO: 2927 - DNA, 36 bp, synthetic construct
  misc_feature 1..36: note = Synthetic oligonucleotide
  source 1..36: mol_type = other DNA
gcgcaaccatcactataacccatttacctgttttca

SEQ ID NO: 2928 - DNA, 38 bp, synthetic construct
  misc_feature 1..38: note = Synthetic oligonucleotide
  source 1..38: mol_type = other DNA
gcgcaccacacttgagttctttaactttccctttatga

SEQ ID NO: 2929 - DNA, 35 bp, synthetic construct
  misc_feature 1..35: note = Synthetic oligonucleotide
  source 1..35: mol_type = other DNA
gccgacgtacctgctgggtctctctattcattttt

SEQ ID NO: 2930 - DNA, 35 bp, synthetic construct
  misc_feature 1..35: note = Synthetic oligonucleotide
  source 1..35: mol_type = other DNA
tacgccgtccaccatcctcttctatatacctaacc

SEQ ID NO: 2931 - DNA, 35 bp, synthetic construct
  misc_feature 1..35: note = Synthetic oligonucleotide
  source 1..35: mol_type = other DNA
tactacgaaccatcccactctttgcacctgttttc

SEQ ID NO: 2932 - DNA, 34 bp, synthetic construct
  misc_feature 1..34: note = Synthetic oligonucleotide
  source 1..34: mol_type = other DNA
tcatgcgcggtacacatttcttaatcacttttct

SEQ ID NO: 2933 - DNA, 35 bp, synthetic construct
  misc_feature 1..35: note = Synthetic oligonucleotide
  source 1..35: mol_type = other DNA
tgcgggcattggtgcaatcttaacttattctttat

SEQ ID NO: 2934 - DNA, 35 bp, synthetic construct
  misc_feature 1..35: note = Synthetic oligonucleotide
  source 1..35: mol_type = other DNA
tggtagtgctgcatcaccgatcatccttttacatt

SEQ ID NO: 2935 - DNA, 37 bp, synthetic construct
  misc_feature 1..37: note = Synthetic oligonucleotide
  source 1..37: mol_type = other DNA
tccgcgactgttcatcccccatcccaacataacccga

SEQ ID NO: 2936 - DNA, 38 bp, synthetic construct
  misc_feature 1..38: note = Synthetic oligonucleotide
  source 1..38: mol_type = other DNA
tgtgaacgtcactgcaccctaaactaatattcccttga

SEQ ID NO: 2937 - DNA, 36 bp, synthetic construct
  misc_feature 1..36: note = Synthetic oligonucleotide
  source 1..36: mol_type = other DNA
ttgacaactgccactaccaactgaacccgctactta

SEQ ID NO: 2938 - DNA, 38 bp, synthetic construct
  misc_feature 1..38: note = Synthetic oligonucleotide
  source 1..38: mol_type = other DNA
ttgtcaagcgctatccaccatttctcttttatctatga

SEQ ID NO: 2939 - DNA, 35 bp, synthetic construct
  misc_feature 1..35: note = Synthetic oligonucleotide
  source 1..35: mol_type = other DNA
caatgcgacgaggcttctatgtcatgaactaagct

SEQ ID NO: 2940 - DNA, 37 bp, synthetic construct
  misc_feature 1..37: note = Synthetic oligonucleotide
  source 1..37: mol_type = other DNA
ccgaacggtcgcaaagtggtgtagcctctaatccgga

SEQ ID NO: 2941 - DNA, 35 bp, synthetic construct; identical to SEQ ID NO: 2877
  misc_feature 1..35: note = Synthetic oligonucleotide
  source 1..35: mol_type = other DNA

SEQ ID NO: 2942 - DNA, 38 bp, synthetic construct
  misc_feature 1..38: note = Synthetic oligonucleotide
  source 1..38: mol_type = other DNA
accggaatgtacatgccctggtttttgttattatttga

SEQ ID NO: 2943 - DNA, 35 bp, synthetic construct
  misc_feature 1..35: note = Synthetic oligonucleotide
  source 1..35: mol_type = other DNA
accatgcgcccaccactattttttccacttcctta

SEQ ID NO: 2944 - DNA, 37 bp, synthetic construct
  misc_feature 1..37: note = Synthetic oligonucleotide
  source 1..37: mol_type = other DNA
acggagtaccctgcccactatataacttaaaccttga

SEQ ID NO: 2945 - DNA, 35 bp, synthetic construct
  misc_feature 1..35: note = Synthetic oligonucleotide
  source 1..35: mol_type = other DNA
acgggcgtgtcgcactgtctgtcactggcttattc

SEQ ID NO: 2946 - DNA, 35 bp, synthetic construct
  misc_feature 1..35: note = Synthetic oligonucleotide
  source 1..35: mol_type = other DNA
agacggtgggtgggtgggtggtgctgcagtctacc

SEQ ID NO: 2947 - DNA, 35 bp, synthetic construct
  misc_feature 1..35: note = Synthetic oligonucleotide
  source 1..35: mol_type = other DNA
catgccgcaccccaacacgtaccatttcattattt

SEQ ID NO: 2948 - DNA, 36 bp, synthetic construct
  misc_feature 1..36: note = Synthetic oligonucleotide
  source 1..36: mol_type = other DNA
catgcgggcatccttagcttaacctcaattccatta

SEQ ID NO: 2949 - DNA, 35 bp, synthetic construct
  misc_feature 1..35: note = Synthetic oligonucleotide
  source 1..35: mol_type = other DNA
catggccattctaccctccattccattccttgcct

SEQ ID NO: 2950 - DNA, 35 bp, synthetic construct
  misc_feature 1..35: note = Synthetic oligonucleotide
  source 1..35: mol_type = other DNA
cgttcggtacgcagtcatttcactctatcttgttc

SEQ ID NO: 2951 - DNA, 37 bp, synthetic construct
  misc_feature 1..37: note = Synthetic oligonucleotide
  source 1..37: mol_type = other DNA
aacccacgagttgttggtccacgcctcgttatcacga

SEQ ID NO: 2952 - DNA, 36 bp, synthetic construct
  misc_feature 1..36: note = Synthetic oligonucleotide
  source 1..36: mol_type = other DNA
aacccatgcctgccccatgtgcattcaggcagagca

SEQ ID NO: 2953 - DNA, 36 bp, synthetic construct
  misc_feature 1..36: note = Synthetic oligonucleotide
  source 1..36: mol_type = other DNA
accgccacagtcatcaacccacctggccgacgacga

SEQ ID NO: 2954 - DNA, 36 bp, synthetic construct
  misc_feature 1..36: note = Synthetic oligonucleotide
  source 1..36: mol_type = other DNA
gacaacgcaaccgcaggctcatggagccaatatgta

SEQ ID NO: 2955 - DNA, 37 bp, synthetic construct
  misc_feature 1..37: note = Synthetic oligonucleotide
  source 1..37: mol_type = other DNA
gacaacacgtcgcatgatcttaaaagaggacctagga

SEQ ID NO: 2956 - DNA, 38 bp, synthetic construct
  misc_feature 1..38: note = Synthetic oligonucleotide
  source 1..38: mol_type = other DNA
gagtggtcgccactcacaacgatgcggtatccccttga

SEQ ID NO: 2957 - DNA, 37 bp, synthetic construct
  misc_feature 1..37: note = Synthetic oligonucleotide
  source 1..37: mol_type = other DNA
gcgtggtggtccgccggtggtgagtcgatgaactgga

SEQ ID NO: 2958 - DNA, 36 bp, synthetic construct
  misc_feature 1..36: note = Synthetic oligonucleotide
  source 1..36: mol_type = other DNA
gtgatcgatagcgagtgttgagctgtcgagagtgga

SEQ ID NO: 2959 - DNA, 36 bp, synthetic construct
  misc_feature 1..36: note = Synthetic oligonucleotide
  source 1..36: mol_type = other DNA
tcacacaccgcgtggctcggacgacaagtagtccta

SEQ ID NO: 2960 - DNA, 35 bp, synthetic construct
  misc_feature 1..35: note = Synthetic oligonucleotide
  source 1..35: mol_type = other DNA
tgaacctgcacagctgttaagaggtggcttacgta

SEQ ID NO: 2961 - DNA, 35 bp, synthetic construct
  misc_feature 1..35: note = Synthetic oligonucleotide
  source 1..35: mol_type = other DNA
actgaccacagctacgtaagcaataaccgatcgtt

SEQ ID NO: 2962 - DNA, 35 bp, synthetic construct
  misc_feature 1..35: note = Synthetic oligonucleotide
  source 1..35: mol_type = other DNA
aagagtacgggcatgagtaataagggagtagccgt

SEQ ID NO: 2963 - DNA, 35 bp, synthetic construct
  misc_feature 1..35: note = Synthetic oligonucleotide
  source 1..35: mol_type = other DNA
agatcgcggtcaatcggtgggtagttaggatcggg

SEQ ID NO: 2964 - DNA, 35 bp, synthetic construct
  misc_feature 1..35: note = Synthetic oligonucleotide
  source 1..35: mol_type = other DNA
gaacacacgtcgatcgccactgagagcagatgtca

SEQ ID NO: 2965 - DNA, 35 bp, synthetic construct
  misc_feature 1..35: note = Synthetic oligonucleotide
  source 1..35: mol_type = other DNA
atcggaggccgtatcaccatatcccaccaccactt

SEQ ID NO: 2966 - DNA, 34 bp, synthetic construct
  misc_feature 1..34: note = Synthetic oligonucleotide
  source 1..34: mol_type = other DNA
cttattttagcaagatcttttatctaaatacaat

SEQ ID NO: 2967 - DNA, 36 bp, synthetic construct
  misc_feature 1..36: note = Synthetic oligonucleotide
  source 1..36: mol_type = other DNA
gacaaacgtagtgctgaacatggcgttctggtccaa

SEQ ID NO: 2968 - DNA, 35 bp, synthetic construct
  misc_feature 1..35: note = Synthetic oligonucleotide
  source 1..35: mol_type = other DNA
ataccgggacaggcgacagaagggtgaaccaatgt

SEQ ID NO: 2969 - DNA, 37 bp, synthetic construct
  misc_feature 1..37: note = Synthetic oligonucleotide
  source 1..37: mol_type = other DNA
gagtggacgtggacgcgaaacgggtcaggcataacga

SEQ ID NO: 2970 - DNA, 36 bp, synthetic construct
  misc_feature 1..36: note = Synthetic oligonucleotide
  source 1..36: mol_type = other DNA
taccacgtggcgcctgacgacttacgcaactgggga

SEQ ID NO: 2971 - DNA, 36 bp, synthetic construct
  misc_feature 1..36: note = Synthetic oligonucleotide
  source 1..36: mol_type = other DNA
tacagccgacatgaacatcccttaatcccaccctaa

SEQ ID NO: 2972 - DNA, 37 bp, synthetic construct
  misc_feature 1..37: note = Synthetic oligonucleotide
  source 1..37: mol_type = other DNA
tgataccgcgcaacgagacttaccacgtcaggatgga

SEQ ID NO: 2973 - DNA, 36 bp, synthetic construct
  misc_feature 1..36: note = Synthetic oligonucleotide
  source 1..36: mol_type = other DNA
atggtgggagcaccgacgtaggaggcctatggcgta

SEQ ID NO: 2974 - DNA, 37 bp, synthetic construct; identical to SEQ ID NO: 2955
  misc_feature 1..37: note = Synthetic oligonucleotide
  source 1..37: mol_type = other DNA

SEQ ID NO: 2975 - DNA, 38 bp, synthetic construct
  misc_feature 1..38: note = Synthetic oligonucleotide
  source 1..38: mol_type = other DNA
gtgaacgtcgctagaaacgatggtgtaaatagtcttga

SEQ ID NO: 2976 - DNA, 36 bp, synthetic construct; identical to SEQ ID NO: 2958
  misc_feature 1..36: note = Synthetic oligonucleotide
  source 1..36: mol_type = other DNA

SEQ ID NO: 2977 - DNA, 37 bp, synthetic construct
  misc_feature 1..37: note = Synthetic oligonucleotide
  source 1..37: mol_type = other DNA
aacacgcaacacacaactctcggcaaatccagcgcga

SEQ ID NO: 2978 - DNA, 37 bp, synthetic construct
  misc_feature 1..37: note = Synthetic oligonucleotide
  source 1..37: mol_type = other DNA
acgacgcaccctgccactatcgtagatactccgacta

SEQ ID NO: 2979 - DNA, 36 bp, synthetic construct
  misc_feature 1..36: note = Synthetic oligonucleotide
  source 1..36: mol_type = other DNA
gaccaatggaccggggactactctgagaaagcgcga

SEQ ID NO: 2980 - DNA, 36 bp, synthetic construct
  misc_feature 1..36: note = Synthetic oligonucleotide
  source 1..36: mol_type = other DNA
agtggaacgcaccgaagttacctacctgagatggga

SEQ ID NO: 2981 - DNA, 37 bp, synthetic construct
  misc_feature 1..37: note = Synthetic oligonucleotide
  source 1..37: mol_type = other DNA
gacgacggggatcctgacaattcctgactaagcgcga

SEQ ID NO: 2982 - DNA, 35 bp, synthetic construct
  misc_feature 1..35: note = Synthetic oligonucleotide
  source 1..35: mol_type = other DNA
gacccgcccagtaagcacacacacagcccaaattt

SEQ ID NO: 2983 - DNA, 37 bp, synthetic construct
  misc_feature 1..37: note = Synthetic oligonucleotide
  source 1..37: mol_type = other DNA
gagcggactcgaatagaactccgcaacaccagcgcga

SEQ ID NO: 2984 - DNA, 37 bp, synthetic construct
  misc_feature 1..37: note = Synthetic oligonucleotide
  source 1..37: mol_type = other DNA
gagacgaggccgggatcatgctagggatcggacagga

SEQ ID NO: 2985 - DNA, 36 bp, synthetic construct
  misc_feature 1..36: note = Synthetic oligonucleotide
  source 1..36: mol_type = other DNA
taccgacaccctcgtgttcccaaacaaggagacgga

SEQ ID NO: 2986 - DNA, 37 bp, synthetic construct
  misc_feature 1..37: note = Synthetic oligonucleotide
  source 1..37: mol_type = other DNA
ggatacgcaccttaaggagggacgaataaaagcgcga

SEQ ID NO: 2987 - DNA, 36 bp, synthetic construct
  misc_feature 1..36: note = Synthetic oligonucleotide
  source 1..36: mol_type = other DNA
tagcacagtggtgcttacggaacatcaccagcgcga

SEQ ID NO: 2988 - DNA, 37 bp, synthetic construct
  misc_feature 1..37: note = Synthetic oligonucleotide
  source 1..37: mol_type = other DNA
tagtcggtcggcctgccgatgcgtcaaggtagcgcga

SEQ ID NO: 2989 - DNA, 37 bp, synthetic construct
  misc_feature 1..37: note = Synthetic oligonucleotide
  source 1..37: mol_type = other DNA
taggaatcaccggctcgggcgaggccgggaagcgcga

SEQ ID NO: 2990 - DNA, 37 bp, synthetic construct
  misc_feature 1..37: note = Synthetic oligonucleotide
  source 1..37: mol_type = other DNA
tgagccgcaaccggcaaacaaggcttcaacagcgcga

SEQ ID NO: 2991 - DNA, 36 bp, synthetic construct
  misc_feature 1..36: note = Synthetic oligonucleotide
  source 1..36: mol_type = other DNA
aacaccacaccgccgctgatccggatggaacctcga

SEQ ID NO: 2992 - DNA, 35 bp, synthetic construct; identical to SEQ ID NO: 2962
  misc_feature 1..35: note = Synthetic oligonucleotide
  source 1..35: mol_type = other DNA

SEQ ID NO: 2993 - DNA, 36 bp, synthetic construct
  misc_feature 1..36: note = Synthetic oligonucleotide
  source 1..36: mol_type = other DNA
acacgtgccccaccaatatgcgataagactttgtta

SEQ ID NO: 2994 - DNA, 36 bp, synthetic construct
  misc_feature 1..36: note = Synthetic oligonucleotide
  source 1..36: mol_type = other DNA
gacaccgaagacgaggctaaagagagaagtgccata

SEQ ID NO: 2995 - DNA, 35 bp, synthetic construct
  misc_feature 1..35: note = Synthetic oligonucleotide
  source 1..35: mol_type = other DNA
atcgccgcacacctgccactcactcttccatcgct

SEQ ID NO: 2996 - DNA, 34 bp, synthetic construct; identical to SEQ ID NO: 2966
  misc_feature 1..34: note = Synthetic oligonucleotide
  source 1..34: mol_type = other DNA

SEQ ID NO: 2997 - DNA, 36 bp, synthetic construct
  misc_feature 1..36: note = Synthetic oligonucleotide
  source 1..36: mol_type = other DNA
gactaacgccgcttatcctcaacgcctaaccttgtt

SEQ ID NO: 2998 - DNA, 37 bp, synthetic construct
  misc_feature 1..37: note = Synthetic oligonucleotide
  source 1..37: mol_type = other DNA
gagtggtcgcctgcaggtgcattccatccagctccga

SEQ ID NO: 2999 - DNA, 35 bp, synthetic construct
  misc_feature 1..35: note = Synthetic oligonucleotide
  source 1..35: mol_type = other DNA
gtggaggctgcaatacggtgcaagagagcttaggg

SEQ ID NO: 3000 - DNA, 37 bp, synthetic construct
  misc_feature 1..37: note = Synthetic oligonucleotide
  source 1..37: mol_type = other DNA
gtcaccgcatgcgggtcaagccctcaactttacttga

SEQ ID NO: 3001 - DNA, 37 bp, synthetic construct
  misc_feature 1..37: note = Synthetic oligonucleotide
  source 1..37: mol_type = other DNA
taagtcgcgccccagtcagtgattgatacagatagga

SEQ ID NO: 3002 - DNA, 36 bp, synthetic construct
  misc_feature 1..36: note = Synthetic oligonucleotide
  source 1..36: mol_type = other DNA
tcaacatgcgtgcaagtggcaccgttctcgtttcga

SEQ ID NO: 3003 - DNA, 34 bp, synthetic construct
  misc_feature 1..34: note = Synthetic oligonucleotide
  source 1..34: mol_type = other DNA
tcttatttagcaagatcttttatctaaatacaat

SEQ ID NO: 3004 - DNA, 37 bp, synthetic construct; identical to SEQ ID NO: 2977
  misc_feature 1..37: note = Synthetic oligonucleotide
  source 1..37: mol_type = other DNA

SEQ ID NO: 3005 - DNA, 37 bp, synthetic construct; identical to SEQ ID NO: 2978
  misc_feature 1..37: note = Synthetic oligonucleotide
  source 1..37: mol_type = other DNA

SEQ ID NO: 3006 - DNA, 36 bp, synthetic construct; identical to SEQ ID NO: 2979
  misc_feature 1..36: note = Synthetic oligonucleotide
  source 1..36: mol_type = other DNA

SEQ ID NO: 3007 - DNA, 37 bp, synthetic construct; identical to SEQ ID NO: 2981
  misc_feature 1..37: note = Synthetic oligonucleotide
  source 1..37: mol_type = other DNA

SEQ ID NO: 3008 - DNA, 37 bp, synthetic construct; identical to SEQ ID NO: 2983
  misc_feature 1..37: note = Synthetic oligonucleotide
  source 1..37: mol_type = other DNA

SEQ ID NO: 3009 - DNA, 37 bp, synthetic construct; identical to SEQ ID NO: 2984
  misc_feature 1..37: note = Synthetic oligonucleotide
  source 1..37: mol_type = other DNA

SEQ ID NO: 3010 - DNA, 36 bp, synthetic construct
  misc_feature 1..36: note = Synthetic oligonucleotide
  source 1..36: mol_type = other DNA
tacgcgggtggtcgaccccactagtagtcatccata

SEQ ID NO: 3011 - DNA, 36 bp, synthetic construct; identical to SEQ ID NO: 2985
  misc_feature 1..36: note = Synthetic oligonucleotide
  source 1..36: mol_type = other DNA

SEQ ID NO: 3012 - DNA, 37 bp, synthetic construct; identical to SEQ ID NO: 2986
  misc_feature 1..37: note = Synthetic oligonucleotide
  source 1..37: mol_type = other DNA

SEQ ID NO: 3013 - DNA, 36 bp, synthetic construct; identical to SEQ ID NO: 2987
  misc_feature 1..36: note = Synthetic oligonucleotide
  source 1..36: mol_type = other DNA

SEQ ID NO: 3014 - DNA, 37 bp, synthetic construct; identical to SEQ ID NO: 2988
  misc_feature 1..37: note = Synthetic oligonucleotide
  source 1..37: mol_type = other DNA

SEQ ID NO: 3015 - DNA, 37 bp, synthetic construct; identical to SEQ ID NO: 2989
  misc_feature 1..37: note = Synthetic oligonucleotide
  source 1..37: mol_type = other DNA

SEQ ID NO: 3016 - DNA, 38 bp, synthetic construct
  misc_feature 1..38: note = Synthetic oligonucleotide
  source 1..38: mol_type = other DNA
tccgaacgggacgtacaccaagccgagctctatcctga

SEQ ID NO: 3017 - DNA, 37 bp, synthetic construct; identical to SEQ ID NO: 2990
  misc_feature 1..37: note = Synthetic oligonucleotide
  source 1..37: mol_type = other DNA

SEQ ID NO: 3018 - DNA, 36 bp, synthetic construct
  misc_feature 1..36: note = Synthetic oligonucleotide
  source 1..36: mol_type = other DNA
accatcgggtcacgtaaaagcggttctaatttctaa

SEQ ID NO: 3019 - DNA, 35 bp, synthetic construct; identical to SEQ ID NO: 721
  misc_feature 1..35: note = Synthetic oligonucleotide
  source 1..35: mol_type = other DNA

SEQ ID NO: 3020 - DNA, 36 bp, synthetic construct
  misc_feature 1..36: note = Synthetic oligonucleotide
  source 1..36: mol_type = other DNA
gaacaggcgttccctactgatttatctgtccccata

SEQ ID NO: 3021 - DNA, 36 bp, synthetic construct
  misc_feature 1..36: note = Synthetic oligonucleotide
  source 1..36: mol_type = other DNA
gaccatgcgagcggcaaagcacggaaaatgtttgaa

SEQ ID NO: 3022 - DNA, 38 bp, synthetic construct
  misc_feature 1..38: note = Synthetic oligonucleotide
  source 1..38: mol_type = other DNA
gagtcatgtccgcctttaacccgacttaagaactttga

SEQ ID NO: 3023 - DNA, 38 bp, synthetic construct
  misc_feature 1..38: note = Synthetic oligonucleotide
  source 1..38: mol_type = other DNA
gcaagatgaagttggtactttcctctctattcttttga

SEQ ID NO: 3024 - DNA, 37 bp, synthetic construct
  misc_feature 1..37: note = Synthetic oligonucleotide
  source 1..37: mol_type = other DNA
gccacaccgcccgtacatacttcctcaccaacattga

SEQ ID NO: 3025 - DNA, 35 bp, synthetic construct
  misc_feature 1..35: note = Synthetic oligonucleotide
  source 1..35: mol_type = other DNA
gcgcgcccaccagtatcttttggtctagataggca

SEQ ID NO: 3026 - DNA, 35 bp, synthetic construct
  misc_feature 1..35: note = Synthetic oligonucleotide
  source 1..35: mol_type = other DNA
gggcccacgccaccgtttgtccacaggaaggatac

SEQ ID NO: 3027 - DNA, 37 bp, synthetic construct
  misc_feature 1..37: note = Synthetic oligonucleotide
  source 1..37: mol_type = other DNA
gtgcggtcatggaattcttttaagcatgataatacga

SEQ ID NO: 3028 - DNA, 35 bp, synthetic construct
  misc_feature 1..35: note = Synthetic oligonucleotide
  source 1..35: mol_type = other DNA
ttgcaaagcgcaccgtccgagccggtggcaccgaa

SEQ ID NO: 3029 - DNA, 37 bp, synthetic construct
  misc_feature 1..37: note = Synthetic oligonucleotide
  source 1..37: mol_type = other DNA
ttcacgccacattcacgggaactgagagtgacgacga

SEQ ID NO: 3030 - DNA, 37 bp, synthetic construct
  misc_feature 1..37: note = Synthetic oligonucleotide
  source 1..37: mol_type = other DNA
tttgcggtcattaacttgcgtgtaggacaccggtgga

SEQ ID NO: 3031 - DNA, 35 bp, synthetic construct
  misc_feature 1..35: note = Synthetic oligonucleotide
  source 1..35: mol_type = other DNA
acgcagtgccgccgaatcctgatcccctaactttc

SEQ ID NO: 3032 - DNA, 35 bp, synthetic construct
  misc_feature 1..35: note = Synthetic oligonucleotide
  source 1..35: mol_type = other DNA
aatgcgtccgacctaactgttgcgattcttctttt

SEQ ID NO: 3033 - DNA, 38 bp, synthetic construct
  misc_feature 1..38: note = Synthetic oligonucleotide
  source 1..38: mol_type = other DNA
acacacaagtccatgcgggcctcacttttcgcctatga

SEQ ID NO: 3034 - DNA, 36 bp, synthetic construct
  misc_feature 1..36: note = Synthetic oligonucleotide
  source 1..36: mol_type = other DNA
agtcccaactgcagggtttatacctctggttctctc

SEQ ID NO: 3035 - DNA, 36 bp, synthetic construct
  misc_feature 1..36: note = Synthetic oligonucleotide
  source 1..36: mol_type = other DNA
gcacacgcccacattgtcctactagctattttatta

SEQ ID NO: 3036 - DNA, 38 bp, synthetic construct
  misc_feature 1..38: note = Synthetic oligonucleotide
  source 1..38: mol_type = other DNA
gccgcccctgagtagttttcgtttttcttgtcctctga

SEQ ID NO: 3037 - DNA, 35 bp, synthetic construct
  misc_feature 1..35: note = Synthetic oligonucleotide
  source 1..35: mol_type = other DNA
gcgatcgatatgttgcctatcctcttacgacatct

SEQ ID NO: 3038 - DNA, 35 bp, synthetic construct
  misc_feature 1..35: note = Synthetic oligonucleotide
  source 1..35: mol_type = other DNA
gcgttgtccgtgtccatccatcttgtcatttgttt

SEQ ID NO: 3039 - DNA, 35 bp, synthetic construct
  misc_feature 1..35: note = Synthetic oligonucleotide
  source 1..35: mol_type = other DNA
taacgtacaaccgggcgcacaggccattcttctac

SEQ ID NO: 3040 - DNA, 35 bp, synthetic construct
  misc_feature 1..35: note = Synthetic oligonucleotide
  source 1..35: mol_type = other DNA
gttcggggtgcatgtcgtgaagccgctaacctctt

SEQ ID NO: 3041 - DNA, 38 bp, synthetic construct
  misc_feature 1..38: note = Synthetic oligonucleotide
  source 1..38: mol_type = other DNA
tgctcagtcaagcgagtaccactacgcctattccgtga

SEQ ID NO: 3042 - DNA, 38 bp, synthetic construct
  misc_feature 1..38: note = Synthetic oligonucleotide
  source 1..38: mol_type = other DNA
tgctaaacgtactggggcttcctcagatctttgcttga

SEQ ID NO: 3043 - DNA, 36 bp, synthetic construct
  misc_feature 1..36: note = Synthetic oligonucleotide
  source 1..36: mol_type = other DNA
tgtacccccgccgtaatcatctatcttgtccccgaa

SEQ ID NO: 3044 - DNA, 35 bp, synthetic construct
  misc_feature 1..35: note = Synthetic oligonucleotide
  source 1..35: mol_type = other DNA
accactgaactcatggtactaatcacacaccaatt

SEQ ID NO: 3045 - DNA, 37 bp, synthetic construct
  misc_feature 1..37: note = Synthetic oligonucleotide
  source 1..37: mol_type = other DNA
actgtacagtagtccacgaacatatcgctttctatga

SEQ ID NO: 3046 - DNA, 38 bp, synthetic construct
  misc_feature 1..38: note = Synthetic oligonucleotide
  source 1..38: mol_type = other DNA
accgcgcgctgcagtatatcccacttcgttctatatga

SEQ ID NO: 3047 - DNA, 35 bp, synthetic construct
  misc_feature 1..35: note = Synthetic oligonucleotide
  source 1..35: mol_type = other DNA
agtggatcactgggcggagtgcgttaggaagacgg

SEQ ID NO: 3048 - DNA, 35 bp, synthetic construct
  misc_feature 1..35: note = Synthetic oligonucleotide
  source 1..35: mol_type = other DNA
gattacgccttaagtggtactcagttatgaggaga

SEQ ID NO: 3049 - DNA, 37 bp, synthetic construct
  misc_feature 1..37: note = Synthetic oligonucleotide
  source 1..37: mol_type = other DNA
gcgtaggtcatgcgacgtataaccttcccacaaatga

SEQ ID NO: 3050 - DNA, 37 bp, synthetic construct
  misc_feature 1..37: note = Synthetic oligonucleotide
  source 1..37: mol_type = other DNA
tacaccaaaaagatcggtgattaccatgcaacaagga

SEQ ID NO: 3051 - DNA, 35 bp, synthetic construct
  misc_feature 1..35: note = Synthetic oligonucleotide
  source 1..35: mol_type = other DNA
taccagacgtaccgcacacctttcatctgcctaac

SEQ ID NO: 3052 - DNA, 35 bp, synthetic construct
  misc_feature 1..35: note = Synthetic oligonucleotide
  source 1..35: mol_type = other DNA
tttgagactgcgggctgtgcgttgctttgatatcc

SEQ ID NO: 3053 - DNA, 35 bp, synthetic construct
  misc_feature 1..35: note = Synthetic oligonucleotide
  source 1..35: mol_type = other DNA
actgactgcatacatccgcatattaaacccgtatt

SEQ ID NO: 3054 - DNA, 36 bp, synthetic construct
  misc_feature 1..36: note = Synthetic oligonucleotide
  source 1..36: mol_type = other DNA
acatctccaggattccccttcagccatggccctaca

SEQ ID NO: 3055 - DNA, 38 bp, synthetic construct
  misc_feature 1..38: note = Synthetic oligonucleotide
  source 1..38: mol_type = other DNA
acgctcagctggcatgtaccccccctctctacacttga

SEQ ID NO: 3056 - DNA, 36 bp, synthetic construct
  misc_feature 1..36: note = Synthetic oligonucleotide
  source 1..36: mol_type = other DNA
actcgcgtgtccaacacggactgcagtagcaatcca

SEQ ID NO: 3057 - DNA, 37 bp, synthetic construct
  misc_feature 1..37: note = Synthetic oligonucleotide
  source 1..37: mol_type = other DNA
gcaggtggtgcaggttattcatgcgaaagggtactga

SEQ ID NO: 3058 - DNA, 36 bp, synthetic construct
  misc_feature 1..36: note = Synthetic oligonucleotide
  source 1..36: mol_type = other DNA
gcggtggaaacgtaatcggacactgcgcatgcgaca

SEQ ID NO: 3059 - DNA, 36 bp, synthetic construct
  misc_feature 1..36: note = Synthetic oligonucleotide
  source 1..36: mol_type = other DNA
tgaacctgcgatggtccgtgcgaacccgatctcaca

SEQ ID NO: 3060 - DNA, 35 bp, synthetic construct
  misc_feature 1..35: note = Synthetic oligonucleotide
  source 1..35: mol_type = other DNA
tcacgtccccaacaacccggagtaattccctgcca

SEQ ID NO: 3061 - DNA, 35 bp, synthetic construct
  misc_feature 1..35: note = Synthetic oligonucleotide
  source 1..35: mol_type = other DNA
tgggtacacatccggcatgccaataacgcttaagt

SEQ ID NO: 3062 - DNA, 35 bp, synthetic construct
  misc_feature 1..35: note = Synthetic oligonucleotide
  source 1..35: mol_type = other DNA
acgcctgtacgatgtcctcggtctcattttatttc

SEQ ID NO: 3063 - DNA, 35 bp, synthetic construct
  misc_feature 1..35: note = Synthetic oligonucleotide
  source 1..35: mol_type = other DNA
aaacgtcaagggaaagcgtagtctcctcgaccctt

SEQ ID NO: 3064 - DNA, 36 bp, synthetic construct
  misc_feature 1..36: note = Synthetic oligonucleotide
  source 1..36: mol_type = other DNA
actgggaagtacgctgtcaggcatttgctaactaaa

SEQ ID NO: 3065 - DNA, 35 bp, synthetic construct
  misc_feature 1..35: note = Synthetic oligonucleotide
  source 1..35: mol_type = other DNA
aatcattgcaggtatatgcgagcgaactacgattc

SEQ ID NO: 3066 - DNA, 35 bp, synthetic construct
  misc_feature 1..35: note = Synthetic oligonucleotide
  source 1..35: mol_type = other DNA
atacgttccggccaactgaaacggagttcgggtct

SEQ ID NO: 3067 - DNA, 36 bp, synthetic construct
  misc_feature 1..36: note = Synthetic oligonucleotide
  source 1..36: mol_type = other DNA
atgcatagctgcccttcttatccgtttccaactaca

SEQ ID NO: 3068 - DNA, 38 bp, synthetic construct
  misc_feature 1..38: note = Synthetic oligonucleotide
  source 1..38: mol_type = other DNA
atgcgaaactgtaagcacccttccaccttgtaccatga

SEQ ID NO: 3069 - DNA, 38 bp, synthetic construct
  misc_feature 1..38: note = Synthetic oligonucleotide
  source 1..38: mol_type = other DNA
gacgccgaaacactaagcttttaacacttacgatatga

SEQ ID NO: 3070 - DNA, 35 bp, synthetic construct
  misc_feature 1..35: note = Synthetic oligonucleotide
  source 1..35: mol_type = other DNA
attatcccagcgatcccgagtcccggcatttactg

SEQ ID NO: 3071 - DNA, 36 bp, synthetic construct
  misc_feature 1..36: note = Synthetic oligonucleotide
  source 1..36: mol_type = other DNA
catgcgcatatcgctccgttcgttcctcaatttcca

SEQ ID NO: 3072 - DNA, 38 bp, synthetic construct
  misc_feature 1..38: note = Synthetic oligonucleotide
  source 1..38: mol_type = other DNA
gcccgaacccgaaaaccgatcgcctgaatcccaattga

SEQ ID NO: 3073 - DNA, 35 bp, synthetic construct
  misc_feature 1..35: note = Synthetic oligonucleotide
  source 1..35: mol_type = other DNA
gcaggctcgcgtagcttcaaactagcagaccacgt

SEQ ID NO: 3074 - DNA, 38 bp, synthetic construct
  misc_feature 1..38: note = Synthetic oligonucleotide
  source 1..38: mol_type = other DNA
gcacgggacgcaagctagactacacaccgactttttga

SEQ ID NO: 3075 - DNA, 38 bp, synthetic construct
  misc_feature 1..38: note = Synthetic oligonucleotide
  source 1..38: mol_type = other DNA
gctggcactgcgaatatcgatctacactatcccactga

SEQ ID NO: 3076 - DNA, 36 bp, synthetic construct
  misc_feature 1..36: note = Synthetic oligonucleotide
  source 1..36: mol_type = other DNA
gctagcacacaggatccctctttattagcacttcaa

SEQ ID NO: 3077 - DNA, 35 bp, synthetic construct
  misc_feature 1..35: note = Synthetic oligonucleotide
  source 1..35: mol_type = other DNA
tatgcgacccgttaaacccgtactcttcctaaact

SEQ ID NO: 3078 - DNA, 38 bp, synthetic construct
  misc_feature 1..38: note = Synthetic oligonucleotide
  source 1..38: mol_type = other DNA
tagtcatgcgcgcatctcaaaatttacttctcaaatga

SEQ ID NO: 3079 - DNA, 38 bp, synthetic construct
  misc_feature 1..38: note = Synthetic oligonucleotide
  source 1..38: mol_type = other DNA
tctacactccgctccttgacctaatttaaagaccttga

SEQ ID NO: 3080 - DNA, 35 bp, synthetic construct
  misc_feature 1..35: note = Synthetic oligonucleotide
  source 1..35: mol_type = other DNA
tcgcggaaacctgcccctgcatcgtagccatccac

SEQ ID NO: 3081 - DNA, 36 bp, synthetic construct
  misc_feature 1..36: note = Synthetic oligonucleotide
  source 1..36: mol_type = other DNA
ttcaccaccacccctttggacccttttaccgagaga

SEQ ID NO: 3082 - DNA, 36 bp, synthetic construct
  misc_feature 1..36: note = Synthetic oligonucleotide
  source 1..36: mol_type = other DNA
ttgcagacctcatttacgcacttgggacttctgcca

SEQ ID NO: 3083 - DNA, 37 bp, synthetic construct
  misc_feature 1..37: note = Synthetic oligonucleotide
  source 1..37: mol_type = other DNA
ttggcacctccactgcttgttctcgattcatgtgcga

SEQ ID NO: 3084 - DNA, 35 bp, synthetic construct
  misc_feature 1..35: note = Synthetic oligonucleotide
  source 1..35: mol_type = other DNA
actgcggtcatcgagttactggctattgcctgacc

SEQ ID NO: 3085 - DNA, 36 bp, synthetic construct
  misc_feature 1..36: note = Synthetic oligonucleotide
  source 1..36: mol_type = other DNA
cccgcggtaatagtgcgggcggacgcggtcatgaca

SEQ ID NO: 3086 - DNA, 36 bp, synthetic construct
  misc_feature 1..36: note = Synthetic oligonucleotide
  source 1..36: mol_type = other DNA
gaacgtagactgactacggtccacacgcccattgta

SEQ ID NO: 3087 - DNA, 35 bp, synthetic construct
  misc_feature 1..35: note = Synthetic oligonucleotide
  source 1..35: mol_type = other DNA
ccaacgacagatatggacgtgctgcgggggcaatc

SEQ ID NO: 3088 - DNA, 35 bp, synthetic construct
  misc_feature 1..35: note = Synthetic oligonucleotide
  source 1..35: mol_type = other DNA
atgcgatgtcacgtgacgtgagtaaccgcccaccc

SEQ ID NO: 3089 - DNA, 35 bp, synthetic construct
  misc_feature 1..35: note = Synthetic oligonucleotide
  source 1..35: mol_type = other DNA
gcccacccttgccagcatgtatgcttgcatgtaac

SEQ ID NO: 3090 - DNA, 35 bp, synthetic construct
  misc_feature 1..35: note = Synthetic oligonucleotide
  source 1..35: mol_type = other DNA
gccggtcatgcggtttgcacaccactccattctac

SEQ ID NO: 3091 - DNA, 36 bp, synthetic construct
  misc_feature 1..36: note = Synthetic oligonucleotide
  source 1..36: mol_type = other DNA
gccaggcccattccttgcgggaggttaacaccagca

SEQ ID NO: 3092 - DNA, 36 bp, synthetic construct; identical to SEQ ID NO: 3058
  misc_feature 1..36: note = Synthetic oligonucleotide
  source 1..36: mol_type = other DNA

SEQ ID NO: 3093 - DNA, 37 bp, synthetic construct
  misc_feature 1..37: note = Synthetic oligonucleotide
  source 1..37: mol_type = other DNA
gtttcaccccggctgggctagttctgttaatgcgaga

SEQ ID NO: 3094 - DNA, 36 bp, synthetic construct
  misc_feature 1..36: note = Synthetic oligonucleotide
  source 1..36: mol_type = other DNA
tgtaccgcggttgcgactatttccttactgcccata

SEQ ID NO: 3095 - DNA, 35 bp, synthetic construct
  misc_feature 1..35: note = Synthetic oligonucleotide
  source 1..35: mol_type = other DNA
ttcgcgacgataactagttgcatgtctgaattcac

SEQ ID NO: 3096 - DNA, 37 bp, synthetic construct
  misc_feature 1..37: note = Synthetic oligonucleotide
  source 1..37: mol_type = other DNA
tgtcactgcacgatgagactttcggcgaatatactga

SEQ ID NO: 3097 - DNA, 36 bp, synthetic construct
  misc_feature 1..36: note = Synthetic oligonucleotide
  source 1..36: mol_type = other DNA
aatgcattgcgttatttcaattgaggcgtcctaaaa

SEQ ID NO: 3098 - DNA, 38 bp, synthetic construct
  misc_feature 1..38: note = Synthetic oligonucleotide
  source 1..38: mol_type = other DNA
gcactgccaactttcttctggggactatttagctttga

SEQ ID NO: 3099 - DNA, 36 bp, synthetic construct
  misc_feature 1..36: note = Synthetic oligonucleotide
  source 1..36: mol_type = other DNA
ggtaccaaaagtactgccatgagagccacttcccaa

SEQ ID NO: 3100 - DNA, 35 bp, synthetic construct
  misc_feature 1..35: note = Synthetic oligonucleotide
  source 1..35: mol_type = other DNA
catacgcacggtcctctactataattgtccaccaa

SEQ ID NO: 3101 - DNA, 35 bp, synthetic construct
  misc_feature 1..35: note = Synthetic oligonucleotide
  source 1..35: mol_type = other DNA
atgctgcggtaatggagccggttcttaaactgcct

SEQ ID NO: 3102 - DNA, 36 bp, synthetic construct
  misc_feature 1..36: note = Synthetic oligonucleotide
  source 1..36: mol_type = other DNA
agttactgacaggcgcgtctttcgcaacactttata

SEQ ID NO: 3103 - DNA, 35 bp, synthetic construct
  misc_feature 1..35: note = Synthetic oligonucleotide
  source 1..35: mol_type = other DNA
gcacccgagcctaatagtcctctattccccttcca

SEQ ID NO: 3104 - DNA, 36 bp, synthetic construct
  misc_feature 1..36: note = Synthetic oligonucleotide
  source 1..36: mol_type = other DNA
gcgagcagtccatggcccatcctcgacttaacctca

SEQ ID NO: 3105 - DNA, 36 bp, synthetic construct
  misc_feature 1..36: note = Synthetic oligonucleotide
  source 1..36: mol_type = other DNA
ggtagcaggcataccctacggaacagttctgtggca

SEQ ID NO: 3106 - DNA, 36 bp, synthetic construct
  misc_feature 1..36: note = Synthetic oligonucleotide
  source 1..36: mol_type = other DNA
taggcacgtgcatcaggcgttctttgcccctgttta

SEQ ID NO: 3107 - DNA, 35 bp, synthetic construct
  misc_feature 1..35: note = Synthetic oligonucleotide
  source 1..35: mol_type = other DNA
tgtgcagtcagtgaacggtgacctagttatgattt

SEQ ID NO: 3108 - DNA, 38 bp, synthetic construct
  misc_feature 1..38: note = Synthetic oligonucleotide
  source 1..38: mol_type = other DNA
agcccgttgctacgttgcagtaggtgtaacttcactga

SEQ ID NO: 3109 - DNA, 38 bp, synthetic construct
  misc_feature 1..38: note = Synthetic oligonucleotide
  source 1..38: mol_type = other DNA
actaactgcaagcgcccttggcccgatttgacctttga

SEQ ID NO: 3110 - DNA, 35 bp, synthetic construct
  misc_feature 1..35: note = Synthetic oligonucleotide
  source 1..35: mol_type = other DNA
actaccgcaaactgcactgtttaaaactccttgaa

SEQ ID NO: 3111 - DNA, 35 bp, synthetic construct
  misc_feature 1..35: note = Synthetic oligonucleotide
  source 1..35: mol_type = other DNA
acgactatcgtacatgtgcgtagtttagattccaa

SEQ ID NO: 3112 - DNA, 37 bp, synthetic construct
  misc_feature 1..37: note = Synthetic oligonucleotide
  source 1..37: mol_type = other DNA
agttgaccacggagtgtactgcaatggagtgtaccga

SEQ ID NO: 3113 - DNA, 36 bp, synthetic construct
  misc_feature 1..36: note = Synthetic oligonucleotide
  source 1..36: mol_type = other DNA
gaacgagcccggatgttaggatcctcgatttgcgta

SEQ ID NO: 3114 - DNA, 35 bp, synthetic construct
  misc_feature 1..35: note = Synthetic oligonucleotide
  source 1..35: mol_type = other DNA
agtgctgccactaagctagaaaagttttcatgccc

SEQ ID NO: 3115 - DNA, 36 bp, synthetic construct
  misc_feature 1..36: note = Synthetic oligonucleotide
  source 1..36: mol_type = other DNA
atcgtaacggactgctatttgtacggatccctataa

SEQ ID NO: 3116 - DNA, 38 bp, synthetic construct
  misc_feature 1..38: note = Synthetic oligonucleotide
  source 1..38: mol_type = other DNA
gcagtctagcgcccgcttgtaccacatcctcgctttga

SEQ ID NO: 3117 - DNA, 35 bp, synthetic construct
  misc_feature 1..35: note = Synthetic oligonucleotide
  source 1..35: mol_type = other DNA
tgtactgagtgcacaacacgtgatgatgatatctt

SEQ ID NO: 3118 - DNA, 36 bp, synthetic construct
  misc_feature 1..36: note = Synthetic oligonucleotide
  source 1..36: mol_type = other DNA
agcggtcaccgcctatggttattcatttttctctta

SEQ ID NO: 3119 - DNA, 35 bp, synthetic construct
  misc_feature 1..35: note = Synthetic oligonucleotide
  source 1..35: mol_type = other DNA
actcagcgatgccctaacttggacgttcggctact

SEQ ID NO: 3120 - DNA, 35 bp, synthetic construct
  misc_feature 1..35: note = Synthetic oligonucleotide
  source 1..35: mol_type = other DNA
cacaccgacgaaactgtcctcgcctactacctatc

SEQ ID NO: 3121 - DNA, 35 bp, synthetic construct
  misc_feature 1..35: note = Synthetic oligonucleotide
  source 1..35: mol_type = other DNA
agtgaggcgtcacggctattactccgtgctaattt

SEQ ID NO: 3122 - DNA, 35 bp, synthetic construct; identical to SEQ ID NO: 3100
  misc_feature 1..35: note = Synthetic oligonucleotide
  source 1..35: mol_type = other DNA

SEQ ID NO: 3123 - DNA, 35 bp, synthetic construct
  misc_feature 1..35: note = Synthetic oligonucleotide
  source 1..35: mol_type = other DNA
gaaacggccatgaaccttttaatctttccaccttt

SEQ ID NO: 3124 - DNA, 36 bp, synthetic construct
  misc_feature 1..36: note = Synthetic oligonucleotide
  source 1..36: mol_type = other DNA
gcgagaggatcaccgtgaggcttcccaactatttta

SEQ ID NO: 3125 - DNA, 35 bp, synthetic construct
  misc_feature 1..35: note = Synthetic oligonucleotide
  source 1..35: mol_type = other DNA
gcgaggcgccctccaacccaacccattcaatggta

SEQ ID NO: 3126 - DNA, 35 bp, synthetic construct
  misc_feature 1..35: note = Synthetic oligonucleotide
  source 1..35: mol_type = other DNA
gcgcagtccgtccacatttggtctactgctttcct

SEQ ID NO: 3127 - DNA, 35 bp, synthetic construct
  misc_feature 1..35: note = Synthetic oligonucleotide
  source 1..35: mol_type = other DNA
gtgcgcctacatatatctcggttacaacctttttc

SEQ ID NO: 3128 - DNA, 35 bp, synthetic construct
  misc_feature 1..35: note = Synthetic oligonucleotide
  source 1..35: mol_type = other DNA
tgcatcccaccactatgatatacctaatgccctct

SEQ ID NO: 3129 - DNA, 36 bp, synthetic construct
  misc_feature 1..36: note = Synthetic oligonucleotide
  source 1..36: mol_type = other DNA
tgcaggccgcatcacctcttgtgccggttcatcaaa

SEQ ID NO: 3130 - DNA, 38 bp, synthetic construct
  misc_feature 1..38: note = Synthetic oligonucleotide
  source 1..38: mol_type = other DNA
tgcgaggctagcttgttgccactatttggtccttatga

SEQ ID NO: 3131 - DNA, 38 bp, synthetic construct; identical to SEQ ID NO: 3108
  misc_feature 1..38: note = Synthetic oligonucleotide
  source 1..38: mol_type = other DNA

SEQ ID NO: 3132 - DNA, 35 bp, synthetic construct
  misc_feature 1..35: note = Synthetic oligonucleotide
  source 1..35: mol_type = other DNA
agggcaacgaacgcaggaatccctcattcctacgg

SEQ ID NO: 3133 - DNA, 35 bp, synthetic construct; identical to SEQ ID NO: 3114
  misc_feature 1..35: note = Synthetic oligonucleotide
  source 1..35: mol_type = other DNA

SEQ ID NO: 3134 - DNA, 35 bp, synthetic construct
  misc_feature 1..35: note = Synthetic oligonucleotide
  source 1..35: mol_type = other DNA
atcctcgttacgtgcacggacttctcatgcgaact

SEQ ID NO: 3135 - DNA, 36 bp, synthetic construct
  misc_feature 1..36: note = Synthetic oligonucleotide
  source 1..36: mol_type = other DNA
gcccaggtttgacgactgccgtgcgctcggtcttaa

SEQ ID NO: 3136 - DNA, 37 bp, synthetic construct
  misc_feature 1..37: note = Synthetic oligonucleotide
  source 1..37: mol_type = other DNA
ggtcatggcgcaacttcatcttttcacacctgattga

SEQ ID NO: 3137 - DNA, 36 bp, synthetic construct; identical to SEQ ID NO: 3105
  misc_feature 1..36: note = Synthetic oligonucleotide
  source 1..36: mol_type = other DNA

SEQ ID NO: 3138 - DNA, 35 bp, synthetic construct
  misc_feature 1..35: note = Synthetic oligonucleotide
  source 1..35: mol_type = other DNA
tcccgcaattacgcagaccgactacgattccaaaa

SEQ ID NO: 3139 - DNA, 38 bp, synthetic construct
  misc_feature 1..38: note = Synthetic oligonucleotide
  source 1..38: mol_type = other DNA
tgtacgtaggtaagcgatacacactgcacccctactga

SEQ ID NO: 3140 - DNA, 35 bp, synthetic construct
  misc_feature 1..35: note = Synthetic oligonucleotide
  source 1..35: mol_type = other DNA
tgacctctgcagtggccagcccattctttagcttc

SEQ ID NO: 3141 - DNA, 35 bp, synthetic construct
  misc_feature 1..35: note = Synthetic oligonucleotide
  source 1..35: mol_type = other DNA
ttactgcaggtgcgatcgcgttctccaacatctct

SEQ ID NO: 3142 - DNA, 37 bp, synthetic construct
  misc_feature 1..37: note = Synthetic oligonucleotide
  source 1..37: mol_type = other DNA
accacgttggttattgccctgctttgaagtcttacga

SEQ ID NO: 3143 - DNA, 36 bp, synthetic construct
  misc_feature 1..36: note = Synthetic oligonucleotide
  source 1..36: mol_type = other DNA
aacacactgcgcctttactttaattttcgattatta

SEQ ID NO: 3144 - DNA, 35 bp, synthetic construct
  misc_feature 1..35: note = Synthetic oligonucleotide
  source 1..35: mol_type = other DNA
agcaccgacgtgataggactgtaatgccctcctct

SEQ ID NO: 3145 - DNA, 35 bp, synthetic construct
  misc_feature 1..35: note = Synthetic oligonucleotide
  source 1..35: mol_type = other DNA
atgcgcgagtcataaggcgtttcttttcactggct

SEQ ID NO: 3146 - DNA, 35 bp, synthetic construct
  misc_feature 1..35: note = Synthetic oligonucleotide
  source 1..35: mol_type = other DNA
atgcgacatgcgttacaataatccgcgcaagccgc

SEQ ID NO: 3147 - DNA, 35 bp, synthetic construct
  misc_feature 1..35: note = Synthetic oligonucleotide
  source 1..35: mol_type = other DNA
gagtgcgcgtacaatttgtcctcttgccgcttttt

SEQ ID NO: 3148 - DNA, 35 bp, synthetic construct
  misc_feature 1..35: note = Synthetic oligonucleotide
  source 1..35: mol_type = other DNA
taagtcatgggcctcatctatacctgatcgatctc

SEQ ID NO: 3149 - DNA, 36 bp, synthetic construct
  misc_feature 1..36: note = Synthetic oligonucleotide
  source 1..36: mol_type = other DNA
tcaggcgggatatgcgctcagggaagcggggagcaa

SEQ ID NO: 3150 - DNA, 37 bp, synthetic construct
  misc_feature 1..37: note = Synthetic oligonucleotide
  source 1..37: mol_type = other DNA
tgagctcgacctgccgtcgtacaatttcccttactga

SEQ ID NO: 3151 - DNA, 38 bp, synthetic construct
  misc_feature 1..38: note = Synthetic oligonucleotide
  source 1..38: mol_type = other DNA
acttaccgcttaatacacttgccggaccttgtgcttga

SEQ ID NO: 3152 - DNA, 35 bp, synthetic construct
  misc_feature 1..35: note = Synthetic oligonucleotide
  source 1..35: mol_type = other DNA
actatagccacctaacccagcactaaacccacgca

SEQ ID NO: 3153 - DNA, 35 bp, synthetic construct
  misc_feature 1..35: note = Synthetic oligonucleotide
  source 1..35: mol_type = other DNA
acccccccgcttcgtgcacttcactcccgaaatcc

SEQ ID NO: 3154 - DNA, 35 bp, synthetic construct
  misc_feature 1..35: note = Synthetic oligonucleotide
  source 1..35: mol_type = other DNA
gccgcaccataactttagcctacccagtgccctgc

SEQ ID NO: 3155 - DNA, 36 bp, synthetic construct
  misc_feature 1..36: note = Synthetic oligonucleotide
  source 1..36: mol_type = other DNA
tgccaccaaatacccaaccctagagtagccttatta

SEQ ID NO: 3156 - DNA, 37 bp, synthetic construct
  misc_feature 1..37: note = Synthetic oligonucleotide
  source 1..37: mol_type = other DNA
actctagccacttgatccaccacgtcggttcccacga

SEQ ID NO: 3157 - DNA, 35 bp, synthetic construct
  misc_feature 1..35: note = Synthetic oligonucleotide
  source 1..35: mol_type = other DNA
ttagcgataaacacatcatcccggacacgccgtgt

SEQ ID NO: 3158 - DNA, 38 bp, synthetic construct
  misc_feature 1..38: note = Synthetic oligonucleotide
  source 1..38: mol_type = other DNA
taccgtcgctcaaaaccggcctaccctaaacccactga

SEQ ID NO: 3159 - DNA, 37 bp, synthetic construct
  misc_feature 1..37: note = Synthetic oligonucleotide
  source 1..37: mol_type = other DNA
accgccgctctactctgtcaccgaacgccctttggga

SEQ ID NO: 3160 - DNA, 38 bp, synthetic construct
  misc_feature 1..38: note = Synthetic oligonucleotide
  source 1..38: mol_type = other DNA
agcccgacccgcttgcctaaacccacccatgacactga

SEQ ID NO: 3161 - DNA, 35 bp, synthetic construct
  misc_feature 1..35: note = Synthetic oligonucleotide
  source 1..35: mol_type = other DNA
aggtacccaccgcaaagcaccagtaaccacaaccc

SEQ ID NO: 3162 - DNA, 37 bp, synthetic construct
  misc_feature 1..37: note = Synthetic oligonucleotide
  source 1..37: mol_type = other DNA
gcatccgaccaatagacccacacatctgtaccaaaga

SEQ ID NO: 3163 - DNA, 35 bp, synthetic construct
  misc_feature 1..35: note = Synthetic oligonucleotide
  source 1..35: mol_type = other DNA
tcccgccgctaccgtaagccactccgaagtactca

SEQ ID NO: 3164 - DNA, 35 bp, synthetic construct
  misc_feature 1..35: note = Synthetic oligonucleotide
  source 1..35: mol_type = other DNA
acgccagaccacccgatatccccccaaatggtaac

SEQ ID NO: 3165 - DNA, 38 bp, synthetic construct
  misc_feature 1..38: note = Synthetic oligonucleotide
  source 1..38: mol_type = other DNA
aaacccacttcttacccggtaatctgccgaccgcatga

SEQ ID NO: 3166 - DNA, 35 bp, synthetic construct
  misc_feature 1..35: note = Synthetic oligonucleotide
  source 1..35: mol_type = other DNA
acgcgtgggctactaaactccatcaccccgtgccc

SEQ ID NO: 3167 - DNA, 36 bp, synthetic construct
  misc_feature 1..36: note = Synthetic oligonucleotide
  source 1..36: mol_type = other DNA
actattccgcatcattgagcacccgaccgaccaaaa

SEQ ID NO: 3168 - DNA, 35 bp, synthetic construct
  misc_feature 1..35: note = Synthetic oligonucleotide
  source 1..35: mol_type = other DNA
acacaaaggctataaccgccgactctccaccagcc

SEQ ID NO: 3169 - DNA, 36 bp, synthetic construct
  misc_feature 1..36: note = Synthetic oligonucleotide
  source 1..36: mol_type = other DNA
accaacaccaaccttctacgccgtaccctctgcaaa

SEQ ID NO: 3170 - DNA, 35 bp, synthetic construct
  misc_feature 1..35: note = Synthetic oligonucleotide
  source 1..35: mol_type = other DNA
aaaccgctatttaccccggaccacgttgacaccga

SEQ ID NO: 3171 - DNA, 37 bp, synthetic construct
  misc_feature 1..37: note = Synthetic oligonucleotide
  source 1..37: mol_type = other DNA
tacgtccaccccgaatcctaattcatacacctaaaga

SEQ ID NO: 3172 - DNA, 36 bp, synthetic construct
  misc_feature 1..36: note = Synthetic oligonucleotide
  source 1..36: mol_type = other DNA
aaatgccacatcacttattcaccccgcgcaccccga

SEQ ID NO: 3173 - DNA, 37 bp, synthetic construct
  misc_feature 1..37: note = Synthetic oligonucleotide
  source 1..37: mol_type = other DNA
acaatcaccttacaccttacgacctgcttaatagaga

SEQ ID NO: 3174 - DNA, 35 bp, synthetic construct
  misc_feature 1..35: note = Synthetic oligonucleotide
  source 1..35: mol_type = other DNA
gttcgtgtacgtcgcattaaccctaccataaaacc

SEQ ID NO: 3175 - DNA, 37 bp, synthetic construct
  misc_feature 1..37: note = Synthetic oligonucleotide
  source 1..37: mol_type = other DNA
gcgtatcaaaaaacccaccgctaactaccacaaccga

SEQ ID NO: 3176 - DNA, 38 bp, synthetic construct
  misc_feature 1..38: note = Synthetic oligonucleotide
  source 1..38: mol_type = other DNA
gtgaacccacctgcgccctacactattaaacgagctga

SEQ ID NO: 3177 - DNA, 35 bp, synthetic construct
  misc_feature 1..35: note = Synthetic oligonucleotide
  source 1..35: mol_type = other DNA
tcaacatgcccacatacaccagacacactatacac

SEQ ID NO: 3178 - DNA, 35 bp, synthetic construct
  misc_feature 1..35: note = Synthetic oligonucleotide
  source 1..35: mol_type = other DNA
catgcaacccgcacttaggcgcgagccaattacca

SEQ ID NO: 3179 - DNA, 37 bp, synthetic construct
  misc_feature 1..37: note = Synthetic oligonucleotide
  source 1..37: mol_type = other DNA
acccccaatccttataccataaacacatgaccggtga

SEQ ID NO: 3180 - DNA, 37 bp, synthetic construct
  misc_feature 1..37: note = Synthetic oligonucleotide
  source 1..37: mol_type = other DNA
accggtcaaccccccacagaacatttcccgtcaccga

SEQ ID NO: 3181 - DNA, 37 bp, synthetic construct
  misc_feature 1..37: note = Synthetic oligonucleotide
  source 1..37: mol_type = other DNA
acatgaatccaactaaaacccgctccgtgccgaacga

SEQ ID NO: 3182 - DNA, 35 bp, synthetic construct
  misc_feature 1..35: note = Synthetic oligonucleotide
  source 1..35: mol_type = other DNA
atcccccaaacacaaacgcgagtttcccgggtcca

SEQ ID NO: 3183 - DNA, 38 bp, synthetic construct
  misc_feature 1..38: note = Synthetic oligonucleotide
  source 1..38: mol_type = other DNA
ctctgcgcgagtcaccctcacctagatccctgatatga

SEQ ID NO: 3184 - DNA, 35 bp, synthetic construct
  misc_feature 1..35: note = Synthetic oligonucleotide
  source 1..35: mol_type = other DNA
ctacccaacggtcacacccaccgcgtatccactac

SEQ ID NO: 3185 - DNA, 35 bp, synthetic construct
  misc_feature 1..35: note = Synthetic oligonucleotide
  source 1..35: mol_type = other DNA
ttacacccgtcaactaaccatacccacgagagagc

SEQ ID NO: 3186 - DNA, 34 bp, synthetic construct
  misc_feature 1..34: note = Synthetic oligonucleotide
  source 1..34: mol_type = other DNA
accccactactaccctctcgtccgcctaactgtc

SEQ ID NO: 3187 - DNA, 36 bp, synthetic construct
  misc_feature 1..36: note = Synthetic oligonucleotide
  source 1..36: mol_type = other DNA
accagtccatatcccgccattgtgtcgttcgatcga

SEQ ID NO: 3188 - DNA, 37 bp, synthetic construct
  misc_feature 1..37: note = Synthetic oligonucleotide
  source 1..37: mol_type = other DNA
gccaccccctaccctaacgacccaatatgactggtga

SEQ ID NO: 3189 - DNA, 38 bp, synthetic construct
  misc_feature 1..38: note = Synthetic oligonucleotide
  source 1..38: mol_type = other DNA
caccaaatatcaagtgcctctctaaccttctgacctga

SEQ ID NO: 3190 - DNA, 36 bp, synthetic construct
  misc_feature 1..36: note = Synthetic oligonucleotide
  source 1..36: mol_type = other DNA
actgtcactaccccacgcgcaaccaacaaataccca

SEQ ID NO: 3191 - DNA, 37 bp, synthetic construct
  misc_feature 1..37: note = Synthetic oligonucleotide
  source 1..37: mol_type = other DNA
agctcgactaaaccacccgtataaaagctatacccga

SEQ ID NO: 3192 - DNA, 35 bp, synthetic construct
  misc_feature 1..35: note = Synthetic oligonucleotide
  source 1..35: mol_type = other DNA
gagcgccctacttcaactcccaaaccacatgaccg

SEQ ID NO: 3193 - DNA, 35 bp, synthetic construct
  misc_feature 1..35: note = Synthetic oligonucleotide
  source 1..35: mol_type = other DNA
aacaaagttcacccatcccacaaccccaattcgac

SEQ ID NO: 3194 - DNA, 37 bp, synthetic construct
  misc_feature 1..37: note = Synthetic oligonucleotide
  source 1..37: mol_type = other DNA
cttctgacccgtagaccacaacttcccgacttcccga

SEQ ID NO: 3195 - DNA, 35 bp, synthetic construct
  misc_feature 1..35: note = Synthetic oligonucleotide
  source 1..35: mol_type = other DNA
accccataccattaactccggattccccagtgctc

SEQ ID NO: 3196 - DNA, 38 bp, synthetic construct
  misc_feature 1..38: note = Synthetic oligonucleotide
  source 1..38: mol_type = other DNA
agccacccacaaaacgcgcaatcagtaaacccacctga

SEQ ID NO: 3197 - DNA, 35 bp, synthetic construct
  misc_feature 1..35: note = Synthetic oligonucleotide
  source 1..35: mol_type = other DNA
tcctaacgctgtcgacgccaccacccggacccact

SEQ ID NO: 3198 - DNA, 36 bp, synthetic construct
  misc_feature 1..36: note = Synthetic oligonucleotide
  source 1..36: mol_type = other DNA
ccaatacccccgcgcccaatcccacacgttatcgta

SEQ ID NO: 3199 - DNA, 36 bp, synthetic construct
  misc_feature 1..36: note = Synthetic oligonucleotide
  source 1..36: mol_type = other DNA
agcttacccactcccgaaagacaccctgacaccgta

SEQ ID NO: 3200 - DNA, 36 bp, synthetic construct
  misc_feature 1..36: note = Synthetic oligonucleotide
  source 1..36: mol_type = other DNA
atgacctaatccaccacccctgcacctcagtctaca

SEQ ID NO: 3201 - DNA, 35 bp, synthetic construct
  misc_feature 1..35: note = Synthetic oligonucleotide
  source 1..35: mol_type = other DNA
atcccgcacacctaaagcaaacgtggcttaggtcc

SEQ ID NO: 3202 - DNA, 37 bp, synthetic construct
  misc_feature 1..37: note = Synthetic oligonucleotide
  source 1..37: mol_type = other DNA
atcctccgcccgggcactaaccagctcctgaccacga

SEQ ID NO: 3203 - DNA, 35 bp, synthetic construct
  misc_feature 1..35: note = Synthetic oligonucleotide
  source 1..35: mol_type = other DNA
actgcgcccatcagataccaaaacctgcaaaccgc

SEQ ID NO: 3204 - DNA, 36 bp, synthetic construct
  misc_feature 1..36: note = Synthetic oligonucleotide
  source 1..36: mol_type = other DNA
gccacccgcctttagccctacagatacacacactaa

SEQ ID NO: 3205 - DNA, 36 bp, synthetic construct
  misc_feature 1..36: note = Synthetic oligonucleotide
  source 1..36: mol_type = other DNA
accccctacgccggctgactaaaccgcacaccctca

SEQ ID NO: 3206 - DNA, 36 bp, synthetic construct
  misc_feature 1..36: note = Synthetic oligonucleotide
  source 1..36: mol_type = other DNA
gtttaccgtacccccttgcactgcccgaccaaccca

SEQ ID NO: 3207 - DNA, 35 bp, synthetic construct
  misc_feature 1..35: note = Synthetic oligonucleotide
  source 1..35: mol_type = other DNA
actggaaccccaatcggagcgaagcctgactaccg

SEQ ID NO: 3208 - DNA, 37 bp, synthetic construct
  misc_feature 1..37: note = Synthetic oligonucleotide
  source 1..37: mol_type = other DNA
tgccaacctaccataccatcaattgacagatacctga

SEQ ID NO: 3209 - DNA, 37 bp, synthetic construct
  misc_feature 1..37: note = Synthetic oligonucleotide
  source 1..37: mol_type = other DNA
tcacccacgccatatactgcactccaaaccccgctga

SEQ ID NO: 3210 - DNA, 36 bp, synthetic construct
  misc_feature 1..36: note = Synthetic oligonucleotide
  source 1..36: mol_type = other DNA
aaactgttcctgtgacaaaaccctcaacccatacca

SEQ ID NO: 3211 - DNA, 37 bp, synthetic construct
  misc_feature 1..37: note = Synthetic oligonucleotide
  source 1..37: mol_type = other DNA
acgccacctacccacctcactatgaaatatactcgga

SEQ ID NO: 3212 - DNA, 35 bp, synthetic construct
  misc_feature 1..35: note = Synthetic oligonucleotide
  source 1..35: mol_type = other DNA
gtccccttaagtccacccatacacgttactgaccc

SEQ ID NO: 3213 - DNA, 37 bp, synthetic construct
  misc_feature 1..37: note = Synthetic oligonucleotide
  source 1..37: mol_type = other DNA
gagaacccaccagcaccaattcacaaacacttacgga

SEQ ID NO: 3214 - DNA, 36 bp, synthetic construct
  misc_feature 1..36: note = Synthetic oligonucleotide
  source 1..36: mol_type = other DNA
acaagcctaacccgacccctagttctcacgttgaca

SEQ ID NO: 3215 - DNA, 38 bp, synthetic construct
  misc_feature 1..38: note = Synthetic oligonucleotide
  source 1..38: mol_type = other DNA
acaccctccaaagcacaaacctacccattagccaatga

SEQ ID NO: 3216 - DNA, 36 bp, synthetic construct
  misc_feature 1..36: note = Synthetic oligonucleotide
  source 1..36: mol_type = other DNA
aagtaccccaactcactgtaggtcactacgacaaca

SEQ ID NO: 3217 - DNA, 35 bp, synthetic construct
  misc_feature 1..35: note = Synthetic oligonucleotide
  source 1..35: mol_type = other DNA
acgccgacccgatattttagcaaatatcacctacc

SEQ ID NO: 3218 - DNA, 38 bp, synthetic construct
  misc_feature 1..38: note = Synthetic oligonucleotide
  source 1..38: mol_type = other DNA
acgttaacacccgcctcccacacccacttgacaggtga

SEQ ID NO: 3219 - DNA, 35 bp, synthetic construct
  misc_feature 1..35: note = Synthetic oligonucleotide
  source 1..35: mol_type = other DNA
catcaagcagtcaacctgactcatcccatgtaccc

SEQ ID NO: 3220 - DNA, 37 bp, synthetic construct
  misc_feature 1..37: note = Synthetic oligonucleotide
  source 1..37: mol_type = other DNA
acgcagttccaccacccattgtcaccaagatcatcga

SEQ ID NO: 3221 - DNA, 37 bp, synthetic construct
  misc_feature 1..37: note = Synthetic oligonucleotide
  source 1..37: mol_type = other DNA
ctatgcaacacccgccttcgcacgttcacactaccga

SEQ ID NO: 3222 - DNA, 35 bp, synthetic construct
  misc_feature 1..35: note = Synthetic oligonucleotide
  source 1..35: mol_type = other DNA
agcatgacacggcacctaccacccgaacgaccatc

SEQ ID NO: 3223 - DNA, 37 bp, synthetic construct
  misc_feature 1..37: note = Synthetic oligonucleotide
  source 1..37: mol_type = other DNA
ttaataccgatttacacgctacccgtcccgggaggga

SEQ ID NO: 3224 - DNA, 37 bp, synthetic construct
  misc_feature 1..37: note = Synthetic oligonucleotide
  source 1..37: mol_type = other DNA
aatacgctccagctcacctaaccctactaatcctcga

SEQ ID NO: 3225 - DNA, 35 bp, synthetic construct
  misc_feature 1..35: note = Synthetic oligonucleotide
  source 1..35: mol_type = other DNA
acggaacaatcccccactatgctccacttcttact

SEQ ID NO: 3226 - DNA, 35 bp, synthetic construct
  misc_feature 1..35: note = Synthetic oligonucleotide
  source 1..35: mol_type = other DNA
gcacacaaacattccaccaggtgacaaccccgaca

SEQ ID NO: 3227 - DNA, 37 bp, synthetic construct
  misc_feature 1..37: note = Synthetic oligonucleotide
  source 1..37: mol_type = other DNA
atccgctctcacgacgccgaccaaacacattccggga

SEQ ID NO: 3228 - DNA, 35 bp, synthetic construct
  misc_feature 1..35: note = Synthetic oligonucleotide
  source 1..35: mol_type = other DNA
tctgcacgcgaagctccgccgaccacaatacaaac

SEQ ID NO: 3229 - DNA, 36 bp, synthetic construct
  misc_feature 1..36: note = Synthetic oligonucleotide
  source 1..36: mol_type = other DNA
tgaaatcgaccacttgagagcgtacttaagcacccg

SEQ ID NO: 3230 - DNA, 34 bp, synthetic construct
  misc_feature 1..34: note = Synthetic oligonucleotide
  source 1..34: mol_type = other DNA
aaccgaatcccaggacctaactcatcccatgaaa

SEQ ID NO: 3231 - DNA, 35 bp, synthetic construct
  misc_feature 1..35: note = Synthetic oligonucleotide
  source 1..35: mol_type = other DNA
atcctcctctgacctcgatctcccttaccaaacgg

SEQ ID NO: 3232 - DNA, 38 bp, synthetic construct
  misc_feature 1..38: note = Synthetic oligonucleotide
  source 1..38: mol_type = other DNA
tggtccaacccccacgccgccatcactggacaacttga

SEQ ID NO: 3233 - DNA, 36 bp, synthetic construct
  misc_feature 1..36: note = Synthetic oligonucleotide
  source 1..36: mol_type = other DNA
gcaccgcgcctctaccctacttacctaccccatcaa

SEQ ID NO: 3234 - DNA, 36 bp, synthetic construct
  misc_feature 1..36: note = Synthetic oligonucleotide
  source 1..36: mol_type = other DNA
ggggcgcacgaaatcagaacaaccctaaaaccccta

SEQ ID NO: 3235 - DNA, 38 bp, synthetic construct
  misc_feature 1..38: note = Synthetic oligonucleotide
  source 1..38: mol_type = other DNA
gactacccgctcactcacccgtcccaaattagatatga

SEQ ID NO: 3236 - DNA, 35 bp, synthetic construct
  misc_feature 1..35: note = Synthetic oligonucleotide
  source 1..35: mol_type = other DNA
tacgccatcaaacccgatacctaaatttagcacac

SEQ ID NO: 3237 - DNA, 36 bp, synthetic construct
  misc_feature 1..36: note = Synthetic oligonucleotide
  source 1..36: mol_type = other DNA
ttgcagaacacgaccaccaccgctttagagccacca

SEQ ID NO: 3238 - DNA, 35 bp, synthetic construct
  misc_feature 1..35: note = Synthetic oligonucleotide
  source 1..35: mol_type = other DNA
taactcggtcctgatgctctacccgtatcaaccct

SEQ ID NO: 3239 - DNA, 35 bp, synthetic construct
  misc_feature 1..35: note = Synthetic oligonucleotide
  source 1..35: mol_type = other DNA
ccgcatcccacagaactcggctactcaaaccacta

SEQ ID NO: 3240 - DNA, 35 bp, synthetic construct
  misc_feature 1..35: note = Synthetic oligonucleotide
  source 1..35: mol_type = other DNA
gcagcactccacatcatcaaccatccacaaacctc

SEQ ID NO: 3241 - DNA, 35 bp, synthetic construct
  misc_feature 1..35: note = Synthetic oligonucleotide
  source 1..35: mol_type = other DNA
actacatagaaggacccaaacatccctaccgcgct

SEQ ID NO: 3242 - DNA, 35 bp, synthetic construct
  misc_feature 1..35: note = Synthetic oligonucleotide
  source 1..35: mol_type = other DNA
aacggcctaacacttagaaacctgactagccctac

SEQ ID NO: 3243 - DNA, 35 bp, synthetic construct
  misc_feature 1..35: note = Synthetic oligonucleotide
  source 1..35: mol_type = other DNA
gccccgccgggctatccgcgacctagcctccctct

SEQ ID NO: 3244 - DNA, 36 bp, synthetic construct
  misc_feature 1..36: note = Synthetic oligonucleotide
  source 1..36: mol_type = other DNA
gagtaatgctacccacaacccgcctaaaccatatca

SEQ ID NO: 3245 - DNA, 37 bp, synthetic construct
  misc_feature 1..37: note = Synthetic oligonucleotide
  source 1..37: mol_type = other DNA
ctcactagactcccaactaaccttcttgctccctaga

SEQ ID NO: 3246 - DNA, 38 bp, synthetic construct
  misc_feature 1..38: note = Synthetic oligonucleotide
  source 1..38: mol_type = other DNA
gaaactcaaacacactaagatcctaatcatatccatga

SEQ ID NO: 3247 - DNA, 38 bp, synthetic construct
  misc_feature 1..38: note = Synthetic oligonucleotide
  source 1..38: mol_type = other DNA
gtcgtagcacgctccttacacgctttaatcctagatga

SEQ ID NO: 3248 - DNA, 35 bp, synthetic construct
  misc_feature 1..35: note = Synthetic oligonucleotide
  source 1..35: mol_type = other DNA
aacgaaacggtctgctaccaccatccccacacacc

SEQ ID NO: 3249 - DNA, 35 bp, synthetic construct
  misc_feature 1..35: note = Synthetic oligonucleotide
  source 1..35: mol_type = other DNA
ccccagagaacccgcacctagtcacacgaccactt

SEQ ID NO: 3250 - DNA, 35 bp, synthetic construct
  misc_feature 1..35: note = Synthetic oligonucleotide
  source 1..35: mol_type = other DNA
ccgagtaccgtcattaatcaactagccgacaccac

SEQ ID NO: 3251 - DNA, 37 bp, synthetic construct
  misc_feature 1..37: note = Synthetic oligonucleotide
  source 1..37: mol_type = other DNA
actgcccgattgtcgctggaattccgctatctccgga

SEQ ID NO: 3252 - DNA, 36 bp, synthetic construct
  misc_feature 1..36: note = Synthetic oligonucleotide
  source 1..36: mol_type = other DNA
tgcgtccccacgaaaccatagccaacccaccggaca

SEQ ID NO: 3253 - DNA, 36 bp, synthetic construct
  misc_feature 1..36: note = Synthetic oligonucleotide
  source 1..36: mol_type = other DNA
accgcaggtcatttcccagtactaccgacagacgca

SEQ ID NO: 3254 - DNA, 35 bp, synthetic construct
  misc_feature 1..35: note = Synthetic oligonucleotide
  source 1..35: mol_type = other DNA
gcccttatgcaaaacccgcggaccggagaccatac

SEQ ID NO: 3255 - DNA, 38 bp, synthetic construct
  misc_feature 1..38: note = Synthetic oligonucleotide
  source 1..38: mol_type = other DNA
acccataagcctagaaccaccctatcacacgaagttga

SEQ ID NO: 3256 - DNA, 37 bp, synthetic construct
  misc_feature 1..37: note = Synthetic oligonucleotide
  source 1..37: mol_type = other DNA
tagtccgagcacgcctataaaatgagccctaattctg

SEQ ID NO: 3257 - DNA, 35 bp, synthetic construct
  misc_feature 1..35: note = Synthetic oligonucleotide
  source 1..35: mol_type = other DNA
cacaccactcgtagctgtctgtcccccgctttagt

SEQ ID NO: 3258 - DNA, 37 bp, synthetic construct
  misc_feature 1..37: note = Synthetic oligonucleotide
  source 1..37: mol_type = other DNA
cgttaccgtactaatcccacccaggcctattcgtgga

SEQ ID NO: 3259 - DNA, 36 bp, synthetic construct
  misc_feature 1..36: note = Synthetic oligonucleotide
  source 1..36: mol_type = other DNA
gcccggggcccactagatccagactcaacaccgcca

SEQ ID NO: 3260 - DNA, 34 bp, synthetic construct
  misc_feature 1..34: note = Synthetic oligonucleotide
  source 1..34: mol_type = other DNA
ccagcatatgccctacccgcatccgatcaactat

SEQ ID NO: 3261 - DNA, 35 bp, synthetic construct
  misc_feature 1..35: note = Synthetic oligonucleotide
  source 1..35: mol_type = other DNA
tccatatcaaaccaccctaaccagacgaatcgggc

SEQ ID NO: 3262 - DNA, 37 bp, synthetic construct
  misc_feature 1..37: note = Synthetic oligonucleotide
  source 1..37: mol_type = other DNA
acctttgaccgcccatgaactcaccgggggacggtga

SEQ ID NO: 3263 - DNA, 35 bp, synthetic construct
  misc_feature 1..35: note = Synthetic oligonucleotide
  source 1..35: mol_type = other DNA
ccatcccgctccctgtaacggaatcactcccctcc

SEQ ID NO: 3264 - DNA, 35 bp, synthetic construct
  misc_feature 1..35: note = Synthetic oligonucleotide
  source 1..35: mol_type = other DNA
cctgcacaccgatacaatgcctaaaaccgcatgtc

SEQ ID NO: 3265 - DNA, 37 bp, synthetic construct
  misc_feature 1..37: note = Synthetic oligonucleotide
  source 1..37: mol_type = other DNA
gcctctgaatcaacccgctagcacttctagacttgga

SEQ ID NO: 3266 - DNA, 37 bp, synthetic construct
  misc_feature 1..37: note = Synthetic oligonucleotide
  source 1..37: mol_type = other DNA
aacgtcaaaaactccgcgccattaaccccaaccggga

SEQ ID NO: 3267 - DNA, 37 bp, synthetic construct
  misc_feature 1..37: note = Synthetic oligonucleotide
  source 1..37: mol_type = other DNA
ttatctacttagcccgcccttactacagtccgcagga

SEQ ID NO: 3268 - DNA, 37 bp, synthetic construct
  misc_feature 1..37: note = Synthetic oligonucleotide
  source 1..37: mol_type = other DNA
ttcacgccgacccgaccctgctttaaagagttcacga

SEQ ID NO: 3269 - DNA, 35 bp, synthetic construct
  misc_feature 1..35: note = Synthetic oligonucleotide
  source 1..35: mol_type = other DNA
agtcactcaccgcgcacgaacgaaacccgctgcac

SEQ ID NO: 3270 - DNA, 38 bp, synthetic construct
  misc_feature 1..38: note = Synthetic oligonucleotide
  source 1..38: mol_type = other DNA
gtccgttcttgtcccgccaaaccatagtaatccgatga

SEQ ID NO: 3271 - DNA, 38 bp, synthetic construct
  misc_feature 1..38: note = Synthetic oligonucleotide
  source 1..38: mol_type = other DNA
actctcaatcctcaggctctgcccttccaaccagatga

SEQ ID NO: 3272 - DNA, 38 bp, synthetic construct
  misc_feature 1..38: note = Synthetic oligonucleotide
  source 1..38: mol_type = other DNA
aacccctattccgtggacactcctatcatgcacgctga

SEQ ID NO: 3273 - DNA, 35 bp, synthetic construct
  misc_feature 1..35: note = Synthetic oligonucleotide
  source 1..35: mol_type = other DNA
accaataaccaactatataccttagatgacttgaa

SEQ ID NO: 3274 - DNA, 37 bp, synthetic construct
  misc_feature 1..37: note = Synthetic oligonucleotide
  source 1..37: mol_type = other DNA
gaccctcagtgcctaccccagtgcaaacaattctgga

SEQ ID NO: 3275 - DNA, 38 bp, synthetic construct
  misc_feature 1..38: note = Synthetic oligonucleotide
  source 1..38: mol_type = other DNA
acaccgtgcccaaactatacggaccacaccgactatga

SEQ ID NO: 3276 - DNA, 36 bp, synthetic construct
  misc_feature 1..36: note = Synthetic oligonucleotide
  source 1..36: mol_type = other DNA
aacctgtcttttcgctatcccacatccgagagacca

SEQ ID NO: 3277 - DNA, 38 bp, synthetic construct
  misc_feature 1..38: note = Synthetic oligonucleotide
  source 1..38: mol_type = other DNA
aaacccgcatctgggaaccggccccaacttggccttga

SEQ ID NO: 3278 - DNA, 37 bp, synthetic construct
  misc_feature 1..37: note = Synthetic oligonucleotide
  source 1..37: mol_type = other DNA
tccgccagtacgcatccaatatagtccggactatgga

SEQ ID NO: 3279 - DNA, 36 bp, synthetic construct
  misc_feature 1..36: note = Synthetic oligonucleotide
  source 1..36: mol_type = other DNA
tgacacgaacgttatgcaatcccgactctggacaaa

SEQ ID NO: 3280 - DNA, 35 bp, synthetic construct
  misc_feature 1..35: note = Synthetic oligonucleotide
  source 1..35: mol_type = other DNA
gcctggcactatactgagtccatccgtacatcccg

SEQ ID NO: 3281 - DNA, 36 bp, synthetic construct
  misc_feature 1..36: note = Synthetic oligonucleotide
  source 1..36: mol_type = other DNA
aatcgtacaggtgtctcccccaccaccccgcgaaaa

SEQ ID NO: 3282 - DNA, 36 bp, synthetic construct
  misc_feature 1..36: note = Synthetic oligonucleotide
  source 1..36: mol_type = other DNA
aacccgcaccccacaactgctacctactggtgcata

SEQ ID NO: 3283 - DNA, 35 bp, synthetic construct
  misc_feature 1..35: note = Synthetic oligonucleotide
  source 1..35: mol_type = other DNA
acaaccccgcaccgttactgccacctctactcacg

SEQ ID NO: 3284 - DNA, 38 bp, synthetic construct
  misc_feature 1..38: note = Synthetic oligonucleotide
  source 1..38: mol_type = other DNA
gaggcattatatcatcccgcatccaatatagaccatga

SEQ ID NO: 3285 - DNA, 37 bp, synthetic construct
  misc_feature 1..37: note = Synthetic oligonucleotide
  source 1..37: mol_type = other DNA
gtcgcgttctacgccccaaccctagctcccttccaga

SEQ ID NO: 3286 - DNA, 36 bp, synthetic construct
  misc_feature 1..36: note = Synthetic oligonucleotide
  source 1..36: mol_type = other DNA
acccaagcaagaatccgactatagctcacctagaca

SEQ ID NO: 3287 - DNA, 37 bp, synthetic construct
  misc_feature 1..37: note = Synthetic oligonucleotide
  source 1..37: mol_type = other DNA
tcttgcacctgcccgcctcagtagactacccgctgga

SEQ ID NO: 3288 - DNA, 38 bp, synthetic construct
  misc_feature 1..38: note = Synthetic oligonucleotide
  source 1..38: mol_type = other DNA
aagttactcctccatctctgcacatggcactagcatga

SEQ ID NO: 3289 - DNA, 36 bp, synthetic construct
  misc_feature 1..36: note = Synthetic oligonucleotide
  source 1..36: mol_type = other DNA
atgcaggcaattaggacatttcactctcgcccgtga

SEQ ID NO: 3290 - DNA, 38 bp, synthetic construct
  misc_feature 1..38: note = Synthetic oligonucleotide
  source 1..38: mol_type = other DNA
acccatattgatccccaccaccaccatcaacgttctga

SEQ ID NO: 3291 - DNA, 37 bp, synthetic construct
  misc_feature 1..37: note = Synthetic oligonucleotide
  source 1..37: mol_type = other DNA
aaagcccagtaactcccggaagattagtaccccccga

SEQ ID NO: 3292 - DNA, 37 bp, synthetic construct
  misc_feature 1..37: note = Synthetic oligonucleotide
  source 1..37: mol_type = other DNA
acttaaggagatcctccccactacacatacccaaaga

SEQ ID NO: 3293 - DNA, 36 bp, synthetic construct
  misc_feature 1..36: note = Synthetic oligonucleotide
  source 1..36: mol_type = other DNA
cccaaatacctattcccgccagtccacgcttatgta

SEQ ID NO: 3294 - DNA, 35 bp, synthetic construct
  misc_feature 1..35: note = Synthetic oligonucleotide
  source 1..35: mol_type = other DNA
aggcacctattacgtccaacccatcccactcggtc

SEQ ID NO: 3295 - DNA, 36 bp, synthetic construct
  misc_feature 1..36: note = Synthetic oligonucleotide
  source 1..36: mol_type = other DNA
acccgccacgaaagcccgactaggtaatacgccgta

SEQ ID NO: 3296 - DNA, 37 bp, synthetic construct
  misc_feature 1..37: note = Synthetic oligonucleotide
  source 1..37: mol_type = other DNA
atcgctccgtttaaatcctaaacccacagccgcttga

SEQ ID NO: 3297 - DNA, 38 bp, synthetic construct
  misc_feature 1..38: note = Synthetic oligonucleotide
  source 1..38: mol_type = other DNA
tgtcatcccacctaaacggggaccatgcatctaaatga

SEQ ID NO: 3298 - DNA, 36 bp, synthetic construct
  misc_feature 1..36: note = Synthetic oligonucleotide
  source 1..36: mol_type = other DNA
gagcactgagtctgacccacaccgcacaggggacta

SEQ ID NO: 3299 - DNA, 38 bp, synthetic construct
  misc_feature 1..38: note = Synthetic oligonucleotide
  source 1..38: mol_type = other DNA
ggtaatccgcctccacacttgcgtgtcccatcatatga

SEQ ID NO: 3300 - DNA, 38 bp, synthetic construct
  misc_feature 1..38: note = Synthetic oligonucleotide
  source 1..38: mol_type = other DNA
tgacaatgacggacccgatactaacccgcagtacttga

SEQ ID NO: 3301 - DNA, 35 bp, synthetic construct
  misc_feature 1..35: note = Synthetic oligonucleotide
  source 1..35: mol_type = other DNA
ggagaaacgtacttgccatccaccccggacatacc

SEQ ID NO: 3302 - DNA, 37 bp, synthetic construct
  misc_feature 1..37: note = Synthetic oligonucleotide
  source 1..37: mol_type = other DNA
acatttgccgcctattcgggcccgcctatcctgtaga

SEQ ID NO: 3303 - DNA, 38 bp, synthetic construct
  misc_feature 1..38: note = Synthetic oligonucleotide
  source 1..38: mol_type = other DNA
acgctcgccgccttttcctagctgtatcccaatgatga

SEQ ID NO: 3304 - DNA, 36 bp, synthetic construct
  misc_feature 1..36: note = Synthetic oligonucleotide
  source 1..36: mol_type = other DNA
cctcgccgcttctgccctacgagtaccccaactaca

SEQ ID NO: 3305 - DNA, 37 bp, synthetic construct
  misc_feature 1..37: note = Synthetic oligonucleotide
  source 1..37: mol_type = other DNA
acccgcccgcttacctgagatatcgagagccccatga

SEQ ID NO: 3306 - DNA, 35 bp, synthetic construct
  misc_feature 1..35: note = Synthetic oligonucleotide
  source 1..35: mol_type = other DNA
ttcccgtccggtactgccctaatcataaagaaacg

SEQ ID NO: 3307 - DNA, 37 bp, synthetic construct
  misc_feature 1..37: note = Synthetic oligonucleotide
  source 1..37: mol_type = other DNA
gtgggtcatcacttcccgcaaatcccgattcctacga

SEQ ID NO: 3308 - DNA, 35 bp, synthetic construct
  misc_feature 1..35: note = Synthetic oligonucleotide
  source 1..35: mol_type = other DNA
acaccgctttgctcggcgacttatcccaaatggta

SEQ ID NO: 3309 - DNA, 37 bp, synthetic construct
  misc_feature 1..37: note = Synthetic oligonucleotide
  source 1..37: mol_type = other DNA
gcgtatcaaaaaacccaccgctaactacaacaaccga

SEQ ID NO: 3310 - DNA, 37 bp, synthetic construct
  misc_feature 1..37: note = Synthetic oligonucleotide
  source 1..37: mol_type = other DNA
ggcccgcctgccaccgaaaacgcgagtacttccaaga

SEQ ID NO: 3311 - DNA, 35 bp, synthetic construct
  misc_feature 1..35: note = Synthetic oligonucleotide
  source 1..35: mol_type = other DNA
gccccagcgcccacctcattccaaatccacgcaat

SEQ ID NO: 3312 - DNA, 37 bp, synthetic construct
  misc_feature 1..37: note = Synthetic oligonucleotide
  source 1..37: mol_type = other DNA
ctcaggctgcaactacccaggttacccatcacttcga

SEQ ID NO: 3313 - DNA, 35 bp, synthetic construct
  misc_feature 1..35: note = Synthetic oligonucleotide
  source 1..35: mol_type = other DNA
acgccgtttctgtgctaccaaccccctgtgctact

SEQ ID NO: 3314 - DNA, 36 bp, synthetic construct
  misc_feature 1..36: note = Synthetic oligonucleotide
  source 1..36: mol_type = other DNA
aaccaccaactctacgcgagttatcctgcccgacga

SEQ ID NO: 3315 - DNA, 36 bp, synthetic construct
  misc_feature 1..36: note = Synthetic oligonucleotide
  source 1..36: mol_type = other DNA
ccctaccacccgaaaacttgaaatcacccgcgtata

SEQ ID NO: 3316 - DNA, 35 bp, synthetic construct
  misc_feature 1..35: note = Synthetic oligonucleotide
  source 1..35: mol_type = other DNA
gacactgcactctgtaccccaacctatgcctctac

SEQ ID NO: 3317 - DNA, 38 bp, synthetic construct
  misc_feature 1..38: note = Synthetic oligonucleotide
  source 1..38: mol_type = other DNA
ctactataatccgctccaccaaaaaatagcctcagtga

SEQ ID NO: 3318 - DNA, 38 bp, synthetic construct
  misc_feature 1..38: note = Synthetic oligonucleotide
  source 1..38: mol_type = other DNA
aggtgtcaactgccactacatccacctgtttccgatga

SEQ ID NO: 3319 - DNA, 38 bp, synthetic construct
  misc_feature 1..38: note = Synthetic oligonucleotide
  source 1..38: mol_type = other DNA
tgtagtattgccttccctcttccgctataaaatgatga

SEQ ID NO: 3320 - DNA, 37 bp, synthetic construct
  misc_feature 1..37: note = Synthetic oligonucleotide
  source 1..37: mol_type = other DNA
gagaacgcccattcgataaccaaaccaacttataaga

SEQ ID NO: 3321 - DNA, 38 bp, synthetic construct
  misc_feature 1..38: note = Synthetic oligonucleotide
  source 1..38: mol_type = other DNA
aggtcatttctactccgattgccagtcaccgatcgtga

SEQ ID NO: 3322 - DNA, 36 bp, synthetic construct
  misc_feature 1..36: note = Synthetic oligonucleotide
  source 1..36: mol_type = other DNA
acttccttggcctggattctacccaataagaactca

SEQ ID NO: 3323 - DNA, 35 bp, synthetic construct
  misc_feature 1..35: note = Synthetic oligonucleotide
  source 1..35: mol_type = other DNA
cttacaaatccttgcctacgacccgaccactggcc

SEQ ID NO: 3324 - DNA, 37 bp, synthetic construct
  misc_feature 1..37: note = Synthetic oligonucleotide
  source 1..37: mol_type = other DNA
gtgcgcctactgctcctacctctgaccacatgtgtga

SEQ ID NO: 3325 - DNA, 35 bp, synthetic construct
  misc_feature 1..35: note = Synthetic oligonucleotide
  source 1..35: mol_type = other DNA
cccctgcctaaaccggttagtgccttgccgctccc

SEQ ID NO: 3326 - DNA, 37 bp, synthetic construct
  misc_feature 1..37: note = Synthetic oligonucleotide
  source 1..37: mol_type = other DNA
actgagtgcatcccacgtactttacaaatccgactga

SEQ ID NO: 3327 - DNA, 35 bp, synthetic construct
  misc_feature 1..35: note = Synthetic oligonucleotide
  source 1..35: mol_type = other DNA
aatccgatcttaccgctatctgataccgagaatta

SEQ ID NO: 3328 - DNA, 38 bp, synthetic construct
  misc_feature 1..38: note = Synthetic oligonucleotide
  source 1..38: mol_type = other DNA
cccaccattacgacctataccccatgttacacgtatga

SEQ ID NO: 3329 - DNA, 35 bp, synthetic construct
  misc_feature 1..35: note = Synthetic oligonucleotide
  source 1..35: mol_type = other DNA
caccgccttagtcccgtaaatactatgctcctctg

SEQ ID NO: 3330 - DNA, 37 bp, synthetic construct
  misc_feature 1..37: note = Synthetic oligonucleotide
  source 1..37: mol_type = other DNA
acagtatacatcacacccctcattttcggagtgccga

SEQ ID NO: 3331 - DNA, 38 bp, synthetic construct
  misc_feature 1..38: note = Synthetic oligonucleotide
  source 1..38: mol_type = other DNA
gcccagtaccggtccaccccgcttccgtactaccctga

SEQ ID NO: 3332 - DNA, 36 bp, synthetic construct
  misc_feature 1..36: note = Synthetic oligonucleotide
  source 1..36: mol_type = other DNA
gaacgtcaccgtatcccccgcatgatcagggcccca

SEQ ID NO: 3333 - DNA, 37 bp, synthetic construct
  misc_feature 1..37: note = Synthetic oligonucleotide
  source 1..37: mol_type = other DNA
gcgcctacgattgacaccgccggaacatacccacaga

SEQ ID NO: 3334 - DNA, 38 bp, synthetic construct
  misc_feature 1..38: note = Synthetic oligonucleotide
  source 1..38: mol_type = other DNA
tattgccccaagatcgacccaacctcaacgcccaatta

SEQ ID NO: 3335 - DNA, 38 bp, synthetic construct
  misc_feature 1..38: note = Synthetic oligonucleotide
  source 1..38: mol_type = other DNA
tccactaccggcgccgacgggccgcatgtaatttctga

SEQ ID NO: 3336 - DNA, 37 bp, synthetic construct
  misc_feature 1..37: note = Synthetic oligonucleotide
  source 1..37: mol_type = other DNA
tcaccaaacgtcatccttcacccgagactgtagggga

SEQ ID NO: 3337 - DNA, 35 bp, synthetic construct
  misc_feature 1..35: note = Synthetic oligonucleotide
  source 1..35: mol_type = other DNA
accgcctctatcggaactttgcttagatactacgc

SEQ ID NO: 3338 - DNA, 37 bp, synthetic construct
  misc_feature 1..37: note = Synthetic oligonucleotide
  source 1..37: mol_type = other DNA
ggacaaaaaacaccttagccccaaatcactaccacta

SEQ ID NO: 3339 - DNA, 37 bp, synthetic construct
  misc_feature 1..37: note = Synthetic oligonucleotide
  source 1..37: mol_type = other DNA
cgcgagccacacctccgcacatttaccctcgggatga

SEQ ID NO: 3340 - DNA, 38 bp, synthetic construct
  misc_feature 1..38: note = Synthetic oligonucleotide
  source 1..38: mol_type = other DNA
ttgtggcttcacccatcaatctcctctgggtctactga

SEQ ID NO: 3341 - DNA, 36 bp, synthetic construct
  misc_feature 1..36: note = Synthetic oligonucleotide
  source 1..36: mol_type = other DNA
ctctgctgactatacccatcataacacgcgagccta

SEQ ID NO: 3342 - DNA, 37 bp, synthetic construct
  misc_feature 1..37: note = Synthetic oligonucleotide
  source 1..37: mol_type = other DNA
taacagcccgacacacccgaactactatggacactga

SEQ ID NO: 3343 - DNA, 38 bp, synthetic construct
  misc_feature 1..38: note = Synthetic oligonucleotide
  source 1..38: mol_type = other DNA
acaccgcatctgccctcggtcaccctacacatcattga

SEQ ID NO: 3344 - DNA, 35 bp, synthetic construct
  misc_feature 1..35: note = Synthetic oligonucleotide
  source 1..35: mol_type = other DNA
actgcctacactacttcgtgcgaacgatagctctt

SEQ ID NO: 3345 - DNA, 35 bp, synthetic construct
  misc_feature 1..35: note = Synthetic oligonucleotide
  source 1..35: mol_type = other DNA
aattccgctctcctgaacgcttggagtcccattca

SEQ ID NO: 3346 - DNA, 35 bp, synthetic construct
  misc_feature 1..35: note = Synthetic oligonucleotide
  source 1..35: mol_type = other DNA
tgctggtcatcacaaccgacgataacgcttaatat

SEQ ID NO: 3347 - DNA, 35 bp, synthetic construct
  misc_feature 1..35: note = Synthetic oligonucleotide
  source 1..35: mol_type = other DNA
gtgacggaacctactactgcactgaaccaccgccc

SEQ ID NO: 3348 - DNA, 35 bp, synthetic construct
  misc_feature 1..35: note = Synthetic oligonucleotide
  source 1..35: mol_type = other DNA
gcccgcgattcacgctccacttaatccgataacct

SEQ ID NO: 3349 - DNA, 37 bp, synthetic construct
  misc_feature 1..37: note = Synthetic oligonucleotide
  source 1..37: mol_type = other DNA
gatatgatcccacttcctagacacctatattacctga

SEQ ID NO: 3350 - DNA, 36 bp, synthetic construct
  misc_feature 1..36: note = Synthetic oligonucleotide
  source 1..36: mol_type = other DNA
cttatctgctgtccctttcgcttggatcacgattaa

SEQ ID NO: 3351 - DNA, 37 bp, synthetic construct
  misc_feature 1..37: note = Synthetic oligonucleotide
  source 1..37: mol_type = other DNA
aatcaactctcatgccgcccatcagtccacgttatga

SEQ ID NO: 3352 - DNA, 36 bp, synthetic construct
  misc_feature 1..36: note = Synthetic oligonucleotide
  source 1..36: mol_type = other DNA
cgcttactcgtactcatcatcacgtgacattcacta

SEQ ID NO: 3353 - DNA, 36 bp, synthetic construct
  misc_feature 1..36: note = Synthetic oligonucleotide
  source 1..36: mol_type = other DNA
tccctatccccccgccagtaaaacccacatgacgga

SEQ ID NO: 3354 - DNA, 36 bp, synthetic construct
  misc_feature 1..36: note = Synthetic oligonucleotide
  source 1..36: mol_type = other DNA
actccatattcacgataacccacagatccgttaaaa

SEQ ID NO: 3355 - DNA, 37 bp, synthetic construct
  misc_feature 1..37: note = Synthetic oligonucleotide
  source 1..37: mol_type = other DNA
tccatcccgactaatttttagacctttgctacacaga

SEQ ID NO: 3356 - DNA, 37 bp, synthetic construct
  misc_feature 1..37: note = Synthetic oligonucleotide
  source 1..37: mol_type = other DNA
gcgttcgttctatactttctaacgttctttacacaga

SEQ ID NO: 3357 - DNA, 37 bp, synthetic construct
  misc_feature 1..37: note = Synthetic oligonucleotide
  source 1..37: mol_type = other DNA
taccggataacaacgccaattttcattaatttcaaga

SEQ ID NO: 3358 - DNA, 37 bp, synthetic construct
  misc_feature 1..37: note = Synthetic oligonucleotide
  source 1..37: mol_type = other DNA
ggactacacgtgagcgcttattctttgactttacaga

SEQ ID NO: 3359 - DNA, 35 bp, synthetic construct
  misc_feature 1..35: note = Synthetic oligonucleotide
  source 1..35: mol_type = other DNA
atcacgggagtgatagtctgggccctgaaactact

SEQ ID NO: 3360 - DNA, 35 bp, synthetic construct
  misc_feature 1..35: note = Synthetic oligonucleotide
  source 1..35: mol_type = other DNA
aaatcccatcgagcccttaacccagaccaactcaa

SEQ ID NO: 3361 - DNA, 35 bp, synthetic construct
  misc_feature 1..35: note = Synthetic oligonucleotide
  source 1..35: mol_type = other DNA
atcatcccggcttttgagtaaaccagcttttcacc

SEQ ID NO: 3362 - DNA, 35 bp, synthetic construct
  misc_feature 1..35: note = Synthetic oligonucleotide
  source 1..35: mol_type = other DNA
gagtacttgactctggtatattttttctccccatt

SEQ ID NO: 3363 - DNA, 35 bp, synthetic construct
  misc_feature 1..35: note = Synthetic oligonucleotide
  source 1..35: mol_type = other DNA
actttacacccgcgaacaatattacctccccgaac

SEQ ID NO: 3364 - DNA, 37 bp, synthetic construct
  misc_feature 1..37: note = Synthetic oligonucleotide
  source 1..37: mol_type = other DNA
aacctggccattacactttccttttgagttctctaga

SEQ ID NO: 3365 - DNA, 36 bp, synthetic construct
  misc_feature 1..36: note = Synthetic oligonucleotide
  source 1..36: mol_type = other DNA
gagtaggcctctgcactcccttctcgagatccgtaa

SEQ ID NO: 3366 - DNA, 35 bp, synthetic construct
  misc_feature 1..35: note = Synthetic oligonucleotide
  source 1..35: mol_type = other DNA
tcttggaggacttttttttgacggttttttgtggt

SEQ ID NO: 3367 - DNA, 37 bp, synthetic construct
  misc_feature 1..37: note = Synthetic oligonucleotide
  source 1..37: mol_type = other DNA
acgcacatctcattccgaataccttacgaataacaga

SEQ ID NO: 3368 - DNA, 37 bp, synthetic construct
  misc_feature 1..37: note = Synthetic oligonucleotide
  source 1..37: mol_type = other DNA
gacctatacatatccgcgcacataaactcgaactaga

SEQ ID NO: 3369 - DNA, 35 bp, synthetic construct
  misc_feature 1..35: note = Synthetic oligonucleotide
  source 1..35: mol_type = other DNA
ggaccgtttttgttttattgatgccgattgaccgc

SEQ ID NO: 3370 - DNA, 38 bp, synthetic construct
  misc_feature 1..38: note = Synthetic oligonucleotide
  source 1..38: mol_type = other DNA
atcttttgcctgatcgcttcgaaattcgttccgcctga

SEQ ID NO: 3371 - DNA, 37 bp, synthetic construct
  misc_feature 1..37: note = Synthetic oligonucleotide
  source 1..37: mol_type = other DNA
ttttgcatatacccttggttcttgttccatccgagga

SEQ ID NO: 3372 - DNA, 35 bp, synthetic construct
  misc_feature 1..35: note = Synthetic oligonucleotide
  source 1..35: mol_type = other DNA
atttttgcaacatttgaaatttgggcattgggaac

SEQ ID NO: 3373 - DNA, 36 bp, synthetic construct
  misc_feature 1..36: note = Synthetic oligonucleotide
  source 1..36: mol_type = other DNA
gagcacttaatttgtttgtatactgatggttttggt

SEQ ID NO: 3374 - DNA, 38 bp, synthetic construct
  misc_feature 1..38: note = Synthetic oligonucleotide
  source 1..38: mol_type = other DNA
cgtagtaccggtctacttcattgcccacttgtatttga

SEQ ID NO: 3375 - DNA, 38 bp, synthetic construct
  misc_feature 1..38: note = Synthetic oligonucleotide
  source 1..38: mol_type = other DNA
atgtggtggcctgaattgagtcctttttgttttgctga

SEQ ID NO: 3376 - DNA, 37 bp, synthetic construct
  misc_feature 1..37: note = Synthetic oligonucleotide
  source 1..37: mol_type = other DNA
acttaccctggtgcactgaaagtgaacatttgtttga

SEQ ID NO: 3377 - DNA, 37 bp, synthetic construct
  misc_feature 1..37: note = Synthetic oligonucleotide
  source 1..37: mol_type = other DNA
ttgcaactataggttgcattggtttttcgatacttga

SEQ ID NO: 3378 - DNA, 35 bp, synthetic construct
  misc_feature 1..35: note = Synthetic oligonucleotide
  source 1..35: mol_type = other DNA
gacgctactaagtgtcgtgggattttttgctctct

SEQ ID NO: 3379 - DNA, 35 bp, synthetic construct
  misc_feature 1..35: note = Synthetic oligonucleotide
  source 1..35: mol_type = other DNA
gcctggattactttgtgagagtttttggggtttgc

SEQ ID NO: 3380 - DNA, 35 bp, synthetic construct
  misc_feature 1..35: note = Synthetic oligonucleotide
  source 1..35: mol_type = other DNA
ggtatagcggtcttgcaaacttgcaaaatcctctt

SEQ ID NO: 3381 - DNA, 38 bp, synthetic construct
  misc_feature 1..38: note = Synthetic oligonucleotide
  source 1..38: mol_type = other DNA
gagtagttccggtcgtttacgggcttttgtttatttga

SEQ ID NO: 3382 - DNA, 38 bp, synthetic construct
  misc_feature 1..38: note = Synthetic oligonucleotide
  source 1..38: mol_type = other DNA
tgggactttgccgcgaagctcttttctgttatctatga

SEQ ID NO: 3383 - DNA, 35 bp, synthetic construct
  misc_feature 1..35: note = Synthetic oligonucleotide
  source 1..35: mol_type = other DNA
gattcgtagcctttaagttttggattgttgcctct

SEQ ID NO: 3384 - DNA, 35 bp, synthetic construct
  misc_feature 1..35: note = Synthetic oligonucleotide
  source 1..35: mol_type = other DNA
ggggccatttagtatgttgtttctttttacgatgc

SEQ ID NO: 3385 - DNA, 38 bp, synthetic construct
  misc_feature 1..38: note = Synthetic oligonucleotide
  source 1..38: mol_type = other DNA
aaatcgaaatcgggccttttgaaacattgccttagtga

SEQ ID NO: 3386 - DNA, 38 bp, synthetic construct
  misc_feature 1..38: note = Synthetic oligonucleotide
  source 1..38: mol_type = other DNA
ggggctaatcgttcgaatttcgctgtgccatttcttga

SEQ ID NO: 3387 - DNA, 37 bp, synthetic construct
  misc_feature 1..37: note = Synthetic oligonucleotide
  source 1..37: mol_type = other DNA
tttcggatattaactttgcgacctcggggtctatcga

SEQ ID NO: 3388 - DNA, 38 bp, synthetic construct
  misc_feature 1..38: note = Synthetic oligonucleotide
  source 1..38: mol_type = other DNA
tgcattctctcggttagttctgtctgtttttgttttga

SEQ ID NO: 3389 - DNA, 37 bp, synthetic construct
  misc_feature 1..37: note = Synthetic oligonucleotide
  source 1..37: mol_type = other DNA
ttcactctacctctctcttgctctgggcttatagtga

SEQ ID NO: 3390 - DNA, 38 bp, synthetic construct
  misc_feature 1..38: note = Synthetic oligonucleotide
  source 1..38: mol_type = other DNA
ggtttcgaattgttagttcctttagtatgatgccttga

SEQ ID NO: 3391 - DNA, 38 bp, synthetic construct
  misc_feature 1..38: note = Synthetic oligonucleotide
  source 1..38: mol_type = other DNA
gaattgccttagttggaattgatgttatttgtttttga

SEQ ID NO: 3392 - DNA, 38 bp, synthetic construct
  misc_feature 1..38: note = Synthetic oligonucleotide
  source 1..38: mol_type = other DNA
atttcctgcgtgggttcgcctcgaattgcccatcttga

SEQ ID NO: 3393 - DNA, 38 bp, synthetic construct
  misc_feature 1..38: note = Synthetic oligonucleotide
  source 1..38: mol_type = other DNA
gcggagaagctttgtatgttttccaccttggttattga

SEQ ID NO: 3394 - DNA, 35 bp, synthetic construct
  misc_feature 1..35: note = Synthetic oligonucleotide
  source 1..35: mol_type = other DNA
gaaccagctgttgattttaccgccttgcccttttc

SEQ ID NO: 3395 - DNA, 37 bp, synthetic construct
  misc_feature 1..37: note = Synthetic oligonucleotide
  source 1..37: mol_type = other DNA
attttgcccgtgattcttattttgtcgctgattgaga

SEQ ID NO: 3396 - DNA, 37 bp, synthetic construct
  misc_feature 1..37: note = Synthetic oligonucleotide
  source 1..37: mol_type = other DNA
tgcccccggtgtttgctttacctgtaagttttcgtga

SEQ ID NO: 3397 - DNA, 36 bp, synthetic construct
  misc_feature 1..36: note = Synthetic oligonucleotide
  source 1..36: mol_type = other DNA
gctcaccgcgaatattttgcttgggatttctgggga

SEQ ID NO: 3398 - DNA, 35 bp, synthetic construct
  misc_feature 1..35: note = Synthetic oligonucleotide
  source 1..35: mol_type = other DNA
agccttaatgaatgaaccatcaacgaattgctctt

SEQ ID NO: 3399 - DNA, 38 bp, synthetic construct
  misc_feature 1..38: note = Synthetic oligonucleotide
  source 1..38: mol_type = other DNA
gtgacgattgcgaaattgacttctcctcttctgtatga

SEQ ID NO: 3400 - DNA, 38 bp, synthetic construct
  misc_feature 1..38: note = Synthetic oligonucleotide
  source 1..38: mol_type = other DNA
gagttgaatgttacccctctgcacaatattttagttga

SEQ ID NO: 3401 - DNA, 38 bp, synthetic construct
  misc_feature 1..38: note = Synthetic oligonucleotide
  source 1..38: mol_type = other DNA
gcgcaccttggggtttagtcatattacttggttcttga

SEQ ID NO: 3402 - DNA, 38 bp, synthetic construct
  misc_feature 1..38: note = Synthetic oligonucleotide
  source 1..38: mol_type = other DNA
ttttggcctaactccgggtttcgctttcctgcctgtga

SEQ ID NO: 3403 - DNA, 36 bp, synthetic construct
  misc_feature 1..36: note = Synthetic oligonucleotide
  source 1..36: mol_type = other DNA
gagtgaggtttgatttgcctattttcagaggggttc

SEQ ID NO: 3404 - DNA, 38 bp, synthetic construct
  misc_feature 1..38: note = Synthetic oligonucleotide
  source 1..38: mol_type = other DNA
gacggtggtcttggggggggttttgttttccagtatga

SEQ ID NO: 3405 - DNA, 37 bp, synthetic construct
  misc_feature 1..37: note = Synthetic oligonucleotide
  source 1..37: mol_type = other DNA
ttcaggtaggagcatttggtggtcttcgctttcttga

SEQ ID NO: 3406 - DNA, 35 bp, synthetic construct
  misc_feature 1..35: note = Synthetic oligonucleotide
  source 1..35: mol_type = other DNA
tcgggtaggttatccctgtatcaccttttttttgc

SEQ ID NO: 3407 - DNA, 38 bp, synthetic construct
  misc_feature 1..38: note = Synthetic oligonucleotide
  source 1..38: mol_type = other DNA
tcactcatgcacttttgagctttgttgctgaattttga

SEQ ID NO: 3408 - DNA, 38 bp, synthetic construct
  misc_feature 1..38: note = Synthetic oligonucleotide
  source 1..38: mol_type = other DNA
acacgcgctttggttattgtgcttttgcttcaccgtga

SEQ ID NO: 3409 - DNA, 35 bp, synthetic construct
  misc_feature 1..35: note = Synthetic oligonucleotide
  source 1..35: mol_type = other DNA
ttatatctggttgacttttttttgcgggttgcacc

SEQ ID NO: 3410 - DNA, 38 bp, synthetic construct
  misc_feature 1..38: note = Synthetic oligonucleotide
  source 1..38: mol_type = other DNA
ggttgcttatgggtcgtaccatttgcatgattctttga

SEQ ID NO: 3411 - DNA, 37 bp, synthetic construct
  misc_feature 1..37: note = Synthetic oligonucleotide
  source 1..37: mol_type = other DNA
tgcccgtccttggttttcacgtgatttgattgtgcga

SEQ ID NO: 3412 - DNA, 37 bp, synthetic construct
  misc_feature 1..37: note = Synthetic oligonucleotide
  source 1..37: mol_type = other DNA
tgcttctgtaagcggagctattaataggtatctttga

SEQ ID NO: 3413 - DNA, 38 bp, synthetic construct
  misc_feature 1..38: note = Synthetic oligonucleotide
  source 1..38: mol_type = other DNA
ttttccatggttgtttttgcctcatcctctcctagtga

SEQ ID NO: 3414 - DNA, 38 bp, synthetic construct
  misc_feature 1..38: note = Synthetic oligonucleotide
  source 1..38: mol_type = other DNA
agcaccccgatcgttaggggttctgttaaattctttga

SEQ ID NO: 3415 - DNA, 36 bp, synthetic construct
  misc_feature 1..36: note = Synthetic oligonucleotide
  source 1..36: mol_type = other DNA
atttcttgccgttgccctgtttttttgtttatgaaa

SEQ ID NO: 3416 - DNA, 38 bp, synthetic construct
  misc_feature 1..38: note = Synthetic oligonucleotide
  source 1..38: mol_type = other DNA
ttatgcaattttcttccgcttggaccataacaggttga

SEQ ID NO: 3417 - DNA, 38 bp, synthetic construct
  misc_feature 1..38: note = Synthetic oligonucleotide
  source 1..38: mol_type = other DNA
tctttggtccgtgtaaataattttgcctgcttttttga

SEQ ID NO: 3418 - DNA, 35 bp, synthetic construct
  misc_feature 1..35: note = Synthetic oligonucleotide
  source 1..35: mol_type = other DNA
aacgcgtactgagcaataaagcttttgccgtgttt

SEQ ID NO: 3419 - DNA, 38 bp, synthetic construct
  misc_feature 1..38: note = Synthetic oligonucleotide
  source 1..38: mol_type = other DNA
agtgagtcgacgacgacgtttctcgatatcccccttga

SEQ ID NO: 3420 - DNA, 37 bp, synthetic construct
  misc_feature 1..37: note = Synthetic oligonucleotide
  source 1..37: mol_type = other DNA
tttgttccattttttatgcattgttttcagtacgtga

SEQ ID NO: 3421 - DNA, 38 bp, synthetic construct
  misc_feature 1..38: note = Synthetic oligonucleotide
  source 1..38: mol_type = other DNA
ttttagctctcatttggttgaggattattctgctttga

SEQ ID NO: 3422 - DNA, 37 bp, synthetic construct
  misc_feature 1..37: note = Synthetic oligonucleotide
  source 1..37: mol_type = other DNA
ttccttagggggtttgacctcatggtccttcgtgtga

SEQ ID NO: 3423 - DNA, 38 bp, synthetic construct
  misc_feature 1..38: note = Synthetic oligonucleotide
  source 1..38: mol_type = other DNA
ttacaatgattttcgaaccgggggttcgagctatttga

SEQ ID NO: 3424 - DNA, 35 bp, synthetic construct
  misc_feature 1..35: note = Synthetic oligonucleotide
  source 1..35: mol_type = other DNA
gttcgcttggccgtggacttcctatattaaatttg

SEQ ID NO: 3425 - DNA, 35 bp, synthetic construct
  misc_feature 1..35: note = Synthetic oligonucleotide
  source 1..35: mol_type = other DNA
gcccttttgctttttgagggatttaacatgcttgg

SEQ ID NO: 3426 - DNA, 35 bp, synthetic construct
  misc_feature 1..35: note = Synthetic oligonucleotide
  source 1..35: mol_type = other DNA
ggaaatagaattgtaggattctctagtgcttttct

SEQ ID NO: 3427 - DNA, 36 bp, synthetic construct
  misc_feature 1..36: note = Synthetic oligonucleotide
  source 1..36: mol_type = other DNA
gaccgtgttcggaccggatgtccgacttcttcttga

SEQ ID NO: 3428 - DNA, 38 bp, synthetic construct
  misc_feature 1..38: note = Synthetic oligonucleotide
  source 1..38: mol_type = other DNA
gagtaatcgtaaattttgccccgctggctctggcttga

SEQ ID NO: 3429 - DNA, 35 bp, synthetic construct
  misc_feature 1..35: note = Synthetic oligonucleotide
  source 1..35: mol_type = other DNA
ttactccttgacgattgtgagttctctttagaagc

SEQ ID NO: 3430 - DNA, 38 bp, synthetic construct
  misc_feature 1..38: note = Synthetic oligonucleotide
  source 1..38: mol_type = other DNA
gcacgggaaggtactgctcgtcatattaacttggttga

SEQ ID NO: 3431 - DNA, 37 bp, synthetic construct
  misc_feature 1..37: note = Synthetic oligonucleotide
  source 1..37: mol_type = other DNA
tccgtagatccgccccaagcatgggtttttagtttga

SEQ ID NO: 3432 - DNA, 36 bp, synthetic construct
  misc_feature 1..36: note = Synthetic oligonucleotide
  source 1..36: mol_type = other DNA
ttctatgcaaagctccaacggtggagtggttttcta

SEQ ID NO: 3433 - DNA, 38 bp, synthetic construct
  misc_feature 1..38: note = Synthetic oligonucleotide
  source 1..38: mol_type = other DNA
tctttatctagcttggtgggctatgcaagcccatttga

SEQ ID NO: 3434 - DNA, 38 bp, synthetic construct
  misc_feature 1..38: note = Synthetic oligonucleotide
  source 1..38: mol_type = other DNA
atcccgttttttacctttgtgagcattatgccgcttga

SEQ ID NO: 3435 - DNA, 37 bp, synthetic construct
  misc_feature 1..37: note = Synthetic oligonucleotide
  source 1..37: mol_type = other DNA
gttttcgcgagttatttccgtaatctgctcttagtga

SEQ ID NO: 3436 - DNA, 35 bp, synthetic construct
  misc_feature 1..35: note = Synthetic oligonucleotide
  source 1..35: mol_type = other DNA
aaattaaacctttgcgcgttttggtgccctttgaa

SEQ ID NO: 3437 - DNA, 36 bp, synthetic construct
  misc_feature 1..36: note = Synthetic oligonucleotide
  source 1..36: mol_type = other DNA
ttttgccgttttccatttatccgtgtaaatgattca

SEQ ID NO: 3438 - DNA, 36 bp, synthetic construct
  misc_feature 1..36: note = Synthetic oligonucleotide
  source 1..36: mol_type = other DNA
gtggtaccatttgactccaacggtgattattgctta

SEQ ID NO: 3439 - DNA, 38 bp, synthetic construct
  misc_feature 1..38: note = Synthetic oligonucleotide
  source 1..38: mol_type = other DNA
gcggtcgttttgacttgtcttcggtctcattggattga

SEQ ID NO: 3440 - DNA, 36 bp, synthetic construct
  misc_feature 1..36: note = Synthetic oligonucleotide
  source 1..36: mol_type = other DNA
gagtggaacgttagctttactttggtgggatcttga

SEQ ID NO: 3441 - DNA, 37 bp, synthetic construct
  misc_feature 1..37: note = Synthetic oligonucleotide
  source 1..37: mol_type = other DNA
acggttcgcactgttcaacgtggtttctccttgggga

SEQ ID NO: 3442 - DNA, 35 bp, synthetic construct
  misc_feature 1..35: note = Synthetic oligonucleotide
  source 1..35: mol_type = other DNA
attgctgtgcctgactatttgaacctttgaccgta

SEQ ID NO: 3443 - DNA, 36 bp, synthetic construct
  misc_feature 1..36: note = Synthetic oligonucleotide
  source 1..36: mol_type = other DNA
attgtttttatttttgccatagggtgtgccttagta

SEQ ID NO: 3444 - DNA, 37 bp, synthetic construct
  misc_feature 1..37: note = Synthetic oligonucleotide
  source 1..37: mol_type = other DNA
acgtcaaccatatgattagctttgttgcccttggaga

SEQ ID NO: 3445 - DNA, 38 bp, synthetic construct
  misc_feature 1..38: note = Synthetic oligonucleotide
  source 1..38: mol_type = other DNA
atttcaaattgctttgctggacggtgctccttacttga

SEQ ID NO: 3446 - DNA, 35 bp, synthetic construct
  misc_feature 1..35: note = Synthetic oligonucleotide
  source 1..35: mol_type = other DNA
tttgcatgaagccattgaccggattggattcttta

SEQ ID NO: 3447 - DNA, 38 bp, synthetic construct
  misc_feature 1..38: note = Synthetic oligonucleotide
  source 1..38: mol_type = other DNA
tcctggagcttctacgtaaatttgatgccttttgatga

SEQ ID NO: 3448 - DNA, 37 bp, synthetic construct
  misc_feature 1..37: note = Synthetic oligonucleotide
  source 1..37: mol_type = other DNA
acagaggtacgttgattctcctcccttgttagcccta

SEQ ID NO: 3449 - DNA, 38 bp, synthetic construct
  misc_feature 1..38: note = Synthetic oligonucleotide
  source 1..38: mol_type = other DNA
attgcatggggattctgcctatgttggttctgttttga

SEQ ID NO: 3450 - DNA, 35 bp, synthetic construct
  misc_feature 1..35: note = Synthetic oligonucleotide
  source 1..35: mol_type = other DNA
gccacgtattcatcacatggggggatgtccttgtt

SEQ ID NO: 3451 - DNA, 36 bp, synthetic construct
  misc_feature 1..36: note = Synthetic oligonucleotide
  source 1..36: mol_type = other DNA
aatgcatcgatgagccattgacttgtttggtttgta

SEQ ID NO: 3452 - DNA, 35 bp, synthetic construct
  misc_feature 1..35: note = Synthetic oligonucleotide
  source 1..35: mol_type = other DNA
attttgatcacatgtgttgtgtaccatttgctatt

SEQ ID NO: 3453 - DNA, 35 bp, synthetic construct
  misc_feature 1..35: note = Synthetic oligonucleotide
  source 1..35: mol_type = other DNA
tgtttgttgcccgctcggcgcagttaccctttgct

SEQ ID NO: 3454 - DNA, 38 bp, synthetic construct
  misc_feature 1..38: note = Synthetic oligonucleotide
  source 1..38: mol_type = other DNA
tgccacccgtgtttggggccctagtgtttttttcgtga

SEQ ID NO: 3455 - DNA, 38 bp, synthetic construct
  misc_feature 1..38: note = Synthetic oligonucleotide
  source 1..38: mol_type = other DNA
cgtcagtaattgcagcatgacaatttcctgcttgttga

SEQ ID NO: 3456 - DNA, 38 bp, synthetic construct
  misc_feature 1..38: note = Synthetic oligonucleotide
  source 1..38: mol_type = other DNA
tgttccctgattttgccactggacctagtaggatttga

SEQ ID NO: 3457 - DNA, 35 bp, synthetic construct
  misc_feature 1..35: note = Synthetic oligonucleotide
  source 1..35: mol_type = other DNA
catgccgaaacgatggtttggatcgtgctcctctg

SEQ ID NO: 3458 - DNA, 38 bp, synthetic construct
  misc_feature 1..38: note = Synthetic oligonucleotide
  source 1..38: mol_type = other DNA
ttcgctatccgggtgatcgctgtggaggtatttcttga

SEQ ID NO: 3459 - DNA, 38 bp, synthetic construct
  misc_feature 1..38: note = Synthetic oligonucleotide
  source 1..38: mol_type = other DNA
tctaattttttgcgtggttctggcctatcaaagtttga

SEQ ID NO: 3460 - DNA, 38 bp, synthetic construct
  misc_feature 1..38: note = Synthetic oligonucleotide
  source 1..38: mol_type = other DNA
gcttccttctgggtgacgggtgatccccgtgcttgtga

SEQ ID NO: 3461 - DNA, 36 bp, synthetic construct
  misc_feature 1..36: note = Synthetic oligonucleotide
  source 1..36: mol_type = other DNA
gagtacactcaattttagtttggtgcatgccctgca

SEQ ID NO: 3462 - DNA, 37 bp, synthetic construct
  misc_feature 1..37: note = Synthetic oligonucleotide
  source 1..37: mol_type = other DNA
ttgctctgttcttaccgcccagtgaacgcgtgttcga

SEQ ID NO: 3463 - DNA, 38 bp, synthetic construct
  misc_feature 1..38: note = Synthetic oligonucleotide
  source 1..38: mol_type = other DNA
acgtgcacaatgttggattgtttttgccctttgtatga

SEQ ID NO: 3464 - DNA, 37 bp, synthetic construct
  misc_feature 1..37: note = Synthetic oligonucleotide
  source 1..37: mol_type = other DNA
tatttgcccgattgtgaaggtgtagcccttgatctga

SEQ ID NO: 3465 - DNA, 38 bp, synthetic construct
  misc_feature 1..38: note = Synthetic oligonucleotide
  source 1..38: mol_type = other DNA
tcgacttgccagggacttttgcatccgccttgatatga

SEQ ID NO: 3466 - DNA, 35 bp, synthetic construct
  misc_feature 1..35: note = Synthetic oligonucleotide
  source 1..35: mol_type = other DNA
gcagggccgcctgttaaggttcctaatttgccgtt

SEQ ID NO: 3467 - DNA, 37 bp, synthetic construct
  misc_feature 1..37: note = Synthetic oligonucleotide
  source 1..37: mol_type = other DNA
ccgttggtgggacacccctgatcttgcctcttattga

SEQ ID NO: 3468 - DNA, 35 bp, synthetic construct
  misc_feature 1..35: note = Synthetic oligonucleotide
  source 1..35: mol_type = other DNA
acccgatagctttgaggtttgtttttctgtgcctt

SEQ ID NO: 3469 - DNA, 36 bp, synthetic construct
  misc_feature 1..36: note = Synthetic oligonucleotide
  source 1..36: mol_type = other DNA
tctagcgtttgcttaccgcacactttctgtgaaaaa

SEQ ID NO: 3470 - DNA, 38 bp, synthetic construct
  misc_feature 1..38: note = Synthetic oligonucleotide
  source 1..38: mol_type = other DNA
gagctttagaggcgcttgagggcgactttcctgtttga

SEQ ID NO: 3471 - DNA, 35 bp, synthetic construct
  misc_feature 1..35: note = Synthetic oligonucleotide
  source 1..35: mol_type = other DNA
aatagaatgatttgtccggtcccgtatttcttgct

SEQ ID NO: 3472 - DNA, 37 bp, synthetic construct
  misc_feature 1..37: note = Synthetic oligonucleotide
  source 1..37: mol_type = other DNA
ttcgtaacgttgaccgtgttgtttcgtttatgcctga

SEQ ID NO: 3473 - DNA, 38 bp, synthetic construct
  misc_feature 1..38: note = Synthetic oligonucleotide
  source 1..38: mol_type = other DNA
agacccgtgaggatacatttttgtttaatttggcttga

SEQ ID NO: 3474 - DNA, 37 bp, synthetic construct
  misc_feature 1..37: note = Synthetic oligonucleotide
  source 1..37: mol_type = other DNA
ttaacgcccaagctcggggaccgtgttctgtttttga

SEQ ID NO: 3475 - DNA, 38 bp, synthetic construct
  misc_feature 1..38: note = Synthetic oligonucleotide
  source 1..38: mol_type = other DNA
gcatggttttgttcgaatatttccgaatcacgatttga

SEQ ID NO: 3476 - DNA, 37 bp, synthetic construct
  misc_feature 1..37: note = Synthetic oligonucleotide
  source 1..37: mol_type = other DNA
ttgcaaatggaacctatgccctgttttaatgacttga

SEQ ID NO: 3477 - DNA, 37 bp, synthetic construct
  misc_feature 1..37: note = Synthetic oligonucleotide
  source 1..37: mol_type = other DNA
attttatcggttttgtacctgatttgctttgattgga

SEQ ID NO: 3478 - DNA, 35 bp, synthetic construct
  misc_feature 1..35: note = Synthetic oligonucleotide
  source 1..35: mol_type = other DNA
agtggacgcgttacctcacttttgcttgaatttgc

SEQ ID NO: 3479 - DNA, 35 bp, synthetic construct
  misc_feature 1..35: note = Synthetic oligonucleotide
  source 1..35: mol_type = other DNA
atgtttgttgttgttcctccccttatgacttaatc

SEQ ID NO: 3480 - DNA, 38 bp, synthetic construct
  misc_feature 1..38: note = Synthetic oligonucleotide
  source 1..38: mol_type = other DNA
tttgcctgtgaggtaaatctcatagtatccgtttttga

SEQ ID NO: 3481 - DNA, 35 bp, synthetic construct
  misc_feature 1..35: note = Synthetic oligonucleotide
  source 1..35: mol_type = other DNA
ttttgcttcgtgtggtggttaactttcgcgcttac

SEQ ID NO: 3482 - DNA, 35 bp, synthetic construct
  misc_feature 1..35: note = Synthetic oligonucleotide
  source 1..35: mol_type = other DNA
tgatcaatctggtccctcttttttggagtcttcac

SEQ ID NO: 3483 - DNA, 37 bp, synthetic construct
  misc_feature 1..37: note = Synthetic oligonucleotide
  source 1..37: mol_type = other DNA
ttagcattcgccttccaaacccacgggtttgccttga

SEQ ID NO: 3484 - DNA, 37 bp, synthetic construct
  misc_feature 1..37: note = Synthetic oligonucleotide
  source 1..37: mol_type = other DNA
acacggttgtccctggattagctctttgatttggtga

SEQ ID NO: 3485 - DNA, 37 bp, synthetic construct
  misc_feature 1..37: note = Synthetic oligonucleotide
  source 1..37: mol_type = other DNA
ttcactcgaggtttcggttttataaatttctgtacga

SEQ ID NO: 3486 - DNA, 38 bp, synthetic construct
  misc_feature 1..38: note = Synthetic oligonucleotide
  source 1..38: mol_type = other DNA
cccaacttggtttctgtttatgatctattcggtgatga

SEQ ID NO: 3487 - DNA, 36 bp, synthetic construct
  misc_feature 1..36: note = Synthetic oligonucleotide
  source 1..36: mol_type = other DNA
attgcccttgtttggtgtgtgtatttttctcatgta

SEQ ID NO: 3488 - DNA, 37 bp, synthetic construct
  misc_feature 1..37: note = Synthetic oligonucleotide
  source 1..37: mol_type = other DNA
actttctgggtttacttctggtggtttccatgtatga

SEQ ID NO: 3489 - DNA, 35 bp, synthetic construct
  misc_feature 1..35: note = Synthetic oligonucleotide
  source 1..35: mol_type = other DNA
ttttgaccctgcgaaccgaatgaccgtaatcgtta

SEQ ID NO: 3490 - DNA, 38 bp, synthetic construct
  misc_feature 1..38: note = Synthetic oligonucleotide
  source 1..38: mol_type = other DNA
gattcttcaactcgggttgacacctgttcgccttttga

SEQ ID NO: 3491 - DNA, 38 bp, synthetic construct
  misc_feature 1..38: note = Synthetic oligonucleotide
  source 1..38: mol_type = other DNA
ggtggtcctttgttgacggaatttatttggttctctga

SEQ ID NO: 3492 - DNA, 37 bp, synthetic construct
  misc_feature 1..37: note = Synthetic oligonucleotide
  source 1..37: mol_type = other DNA
tatttcttccgtgttttccatactgtgatgatggaga

SEQ ID NO: 3493 - DNA, 35 bp, synthetic construct
  misc_feature 1..35: note = Synthetic oligonucleotide
  source 1..35: mol_type = other DNA
tttggctctttagcacacgggtttctagttccgtt

SEQ ID NO: 3494 - DNA, 38 bp, synthetic construct
  misc_feature 1..38: note = Synthetic oligonucleotide
  source 1..38: mol_type = other DNA
ggaagtactgtactccgaatcggatcggatttttttga

SEQ ID NO: 3495 - DNA, 35 bp, synthetic construct
  misc_feature 1..35: note = Synthetic oligonucleotide
  source 1..35: mol_type = other DNA
aataggaacttgccctcgcttttaattgttgcctt

SEQ ID NO: 3496 - DNA, 38 bp, synthetic construct
  misc_feature 1..38: note = Synthetic oligonucleotide
  source 1..38: mol_type = other DNA
ttttctgacttttggggtggtctaaatatacttggtga

SEQ ID NO: 3497 - DNA, 35 bp, synthetic construct
  misc_feature 1..35: note = Synthetic oligonucleotide
  source 1..35: mol_type = other DNA
aatttgcctcgtttttccgggtcctgaagggatct

SEQ ID NO: 3498 - DNA, 35 bp, synthetic construct
  misc_feature 1..35: note = Synthetic oligonucleotide
  source 1..35: mol_type = other DNA
tcgacttaatgtcttattcggagccctacttgaaa

SEQ ID NO: 3499 - DNA, 38 bp, synthetic construct
  misc_feature 1..38: note = Synthetic oligonucleotide
  source 1..38: mol_type = other DNA
gccgctaacgctgaaccgacgttgttaaatccgtgtga

SEQ ID NO: 3500 - DNA, 38 bp, synthetic construct
  misc_feature 1..38: note = Synthetic oligonucleotide
  source 1..38: mol_type = other DNA
ttccttgatggggttcgcctttttctgccaactattga

SEQ ID NO: 3501 - DNA, 35 bp, synthetic construct
  misc_feature 1..35: note = Synthetic oligonucleotide
  source 1..35: mol_type = other DNA
gcaccgaagagtacgtttcgaccttggattattgc

SEQ ID NO: 3502 - DNA, 35 bp, synthetic construct
  misc_feature 1..35: note = Synthetic oligonucleotide
  source 1..35: mol_type = other DNA
tactgtcctattccccgtagttttttgtacctgga

SEQ ID NO: 3503 - DNA, 38 bp, synthetic construct
  misc_feature 1..38: note = Synthetic oligonucleotide
  source 1..38: mol_type = other DNA
ttgcgaacttggttagcccgcctagagggttgatttga

SEQ ID NO: 3504 - DNA, 36 bp, synthetic construct
  misc_feature 1..36: note = Synthetic oligonucleotide
  source 1..36: mol_type = other DNA
gaatgtcaccttgtggtagtgggtttctggttttga

SEQ ID NO: 3505 - DNA, 37 bp, synthetic construct
  misc_feature 1..37: note = Synthetic oligonucleotide
  source 1..37: mol_type = other DNA
tgaaccacttagatccgttccttaaccctgcttatga

SEQ ID NO: 3506 - DNA, 35 bp, synthetic construct
  misc_feature 1..35: note = Synthetic oligonucleotide
  source 1..35: mol_type = other DNA
ttaatcccctttcttctcgcttatgaagaaactta

SEQ ID NO: 3507 - DNA, 37 bp, synthetic construct
  misc_feature 1..37: note = Synthetic oligonucleotide
  source 1..37: mol_type = other DNA
gagtgcgggttgatcacttggtggggtatcttcttga

SEQ ID NO: 3508 - DNA, 35 bp, synthetic construct
  misc_feature 1..35: note = Synthetic oligonucleotide
  source 1..35: mol_type = other DNA
tcaacacgctgaccatatgttacttgtgccctgct

SEQ ID NO: 3509 - DNA, 36 bp, synthetic construct
  misc_feature 1..36: note = Synthetic oligonucleotide
  source 1..36: mol_type = other DNA
aattctctcagtttcgctcgtagcgagtttttgcca

SEQ ID NO: 3510 - DNA, 38 bp, synthetic construct
  misc_feature 1..38: note = Synthetic oligonucleotide
  source 1..38: mol_type = other DNA
aagttctttgccctttctttgctacctgaataatatga

SEQ ID NO: 3511 - DNA, 38 bp, synthetic construct
  misc_feature 1..38: note = Synthetic oligonucleotide
  source 1..38: mol_type = other DNA
tgcagtatggacacagtgggtattttgttgtttggtga

SEQ ID NO: 3512 - DNA, 38 bp, synthetic construct
  misc_feature 1..38: note = Synthetic oligonucleotide
  source 1..38: mol_type = other DNA
ttggagctgtactcccgctttatatctgtatctcgtga

SEQ ID NO: 3513 - DNA, 35 bp, synthetic construct
  misc_feature 1..35: note = Synthetic oligonucleotide
  source 1..35: mol_type = other DNA
actttaacgaaactttgccgtatttcgtttgattc

SEQ ID NO: 3514 - DNA, 38 bp, synthetic construct
  misc_feature 1..38: note = Synthetic oligonucleotide
  source 1..38: mol_type = other DNA
acattgtaaatcccaattctgatggtttgtttgtttga

SEQ ID NO: 3515 - DNA, 38 bp, synthetic construct
  misc_feature 1..38: note = Synthetic oligonucleotide
  source 1..38: mol_type = other DNA
atccggtttgatcttcggagatgatatgaaatttgtga

SEQ ID NO: 3516 - DNA, 35 bp, synthetic construct
  misc_feature 1..35: note = Synthetic oligonucleotide
  source 1..35: mol_type = other DNA
acggcgtgagccatggaaaagtaaattttgcccga

SEQ ID NO: 3517 - DNA, 35 bp, synthetic construct
  misc_feature 1..35: note = Synthetic oligonucleotide
  source 1..35: mol_type = other DNA
atccaaaacataacctttgccgggggtattctctt

SEQ ID NO: 3518 - DNA, 38 bp, synthetic construct
  misc_feature 1..38: note = Synthetic oligonucleotide
  source 1..38: mol_type = other DNA
ttgctcggtcaaatattgttcgttgtttcaacccgtga

SEQ ID NO: 3519 - DNA, 38 bp, synthetic construct
  misc_feature 1..38: note = Synthetic oligonucleotide
  source 1..38: mol_type = other DNA
attgcatatccgttttctcaactgtaccgcttgggtga

SEQ ID NO: 3520 - DNA, 35 bp, synthetic construct
  misc_feature 1..35: note = Synthetic oligonucleotide
  source 1..35: mol_type = other DNA
acctggaccggtgtcgaaccggaaatctgccctct

SEQ ID NO: 3521 - DNA, 38 bp, synthetic construct
  misc_feature 1..38: note = Synthetic oligonucleotide
  source 1..38: mol_type = other DNA
catgcagtgggtaactaaacgcttctgtatactggtga

SEQ ID NO: 3522 - DNA, 35 bp, synthetic construct
  misc_feature 1..35: note = Synthetic oligonucleotide
  source 1..35: mol_type = other DNA
tcatgaagcttggcttctgaaatccacacgatttt

SEQ ID NO: 3523 - DNA, 35 bp, synthetic construct
  misc_feature 1..35: note = Synthetic oligonucleotide
  source 1..35: mol_type = other DNA
gcacccggttttgtttaactgcttgtaggaccacc

SEQ ID NO: 3524 - DNA, 35 bp, synthetic construct
  misc_feature 1..35: note = Synthetic oligonucleotide
  source 1..35: mol_type = other DNA
ttttcgccgtgaggaataccgttgggtcctttgtt

SEQ ID NO: 3525 - DNA, 38 bp, synthetic construct
  misc_feature 1..38: note = Synthetic oligonucleotide
  source 1..38: mol_type = other DNA
tcgttaaattgggcttgcctgtgccttttttcccgtga

SEQ ID NO: 3526 - DNA, 38 bp, synthetic construct
  misc_feature 1..38: note = Synthetic oligonucleotide
  source 1..38: mol_type = other DNA
attgggggtcaccttgggtttggatgttttttgtttga

SEQ ID NO: 3527 - DNA, 37 bp, synthetic construct
  misc_feature 1..37: note = Synthetic oligonucleotide
  source 1..37: mol_type = other DNA
ttgacgaaattacccggtattgtgcttataaattgga

SEQ ID NO: 3528 - DNA, 37 bp, synthetic construct
  misc_feature 1..37: note = Synthetic oligonucleotide
  source 1..37: mol_type = other DNA
tgcgattgattccttccgtgccgttttgaaactatga

SEQ ID NO: 3529 - DNA, 36 bp, synthetic construct
  misc_feature 1..36: note = Synthetic oligonucleotide
  source 1..36: mol_type = other DNA
tctgtgccaataactctaaatgccgcttagtttgaa

SEQ ID NO: 3530 - DNA, 38 bp, synthetic construct
  misc_feature 1..38: note = Synthetic oligonucleotide
  source 1..38: mol_type = other DNA
atggtgatcggtggtttgttactctgtccgtttcttga

SEQ ID NO: 3531 - DNA, 35 bp, synthetic construct
  misc_feature 1..35: note = Synthetic oligonucleotide
  source 1..35: mol_type = other DNA
gcccggttacgtaccttggggtgtttgtctcttgc

SEQ ID NO: 3532 - DNA, 35 bp, synthetic construct
  misc_feature 1..35: note = Synthetic oligonucleotide
  source 1..35: mol_type = other DNA
tgcgagtcctctgaatctgatcctaaacttcttgc

SEQ ID NO: 3533 - DNA, 38 bp, synthetic construct
  misc_feature 1..38: note = Synthetic oligonucleotide
  source 1..38: mol_type = other DNA
actccggccttcttctgtatcggtttttttgctgttga

SEQ ID NO: 3534 - DNA, 35 bp, synthetic construct
  misc_feature 1..35: note = Synthetic oligonucleotide
  source 1..35: mol_type = other DNA
tcgactcttgtgccatggtttccttatctggtatt

SEQ ID NO: 3535 - DNA, 36 bp, synthetic construct
  misc_feature 1..36: note = Synthetic oligonucleotide
  source 1..36: mol_type = other DNA
ttcgatctgtgcgaacagattttgttttgccctgga

SEQ ID NO: 3536 - DNA, 35 bp, synthetic construct
  misc_feature 1..35: note = Synthetic oligonucleotide
  source 1..35: mol_type = other DNA
ttcgtcgtttaaacacatttgtccgctatgcctta

SEQ ID NO: 3537 - DNA, 37 bp, synthetic construct
  misc_feature 1..37: note = Synthetic oligonucleotide
  source 1..37: mol_type = other DNA
atggaaggggttccatttcctttatttgggttttcga

SEQ ID NO: 3538 - DNA, 37 bp, synthetic construct
  misc_feature 1..37: note = Synthetic oligonucleotide
  source 1..37: mol_type = other DNA
tgcttgggtgcaatgcgaacgcatattaatttgttga

SEQ ID NO: 3539 - DNA, 35 bp, synthetic construct
  misc_feature 1..35: note = Synthetic oligonucleotide
  source 1..35: mol_type = other DNA
gcattgtgtaacttcggtttttttggaattttcgc

SEQ ID NO: 3540 - DNA, 36 bp, synthetic construct
  misc_feature 1..36: note = Synthetic oligonucleotide
  source 1..36: mol_type = other DNA
gggtccaaacggcttggccattttctctatttctga

SEQ ID NO: 3541 - DNA, 38 bp, synthetic construct
  misc_feature 1..38: note = Synthetic oligonucleotide
  source 1..38: mol_type = other DNA
gataatcttgctccgtagaaacatacttactctggtga

SEQ ID NO: 3542 - DNA, 35 bp, synthetic construct
  misc_feature 1..35: note = Synthetic oligonucleotide
  source 1..35: mol_type = other DNA
atcgagtgtctcccgttttatctttgattgtttgc

SEQ ID NO: 3543 - DNA, 36 bp, synthetic construct
  misc_feature 1..36: note = Synthetic oligonucleotide
  source 1..36: mol_type = other DNA
tctctgtattcgtttttctgatatttggttgtagaa

SEQ ID NO: 3544 - DNA, 36 bp, synthetic construct
  misc_feature 1..36: note = Synthetic oligonucleotide
  source 1..36: mol_type = other DNA
tctcctgggtcccgttcggttatattatgcttgtga

SEQ ID NO: 3545 - DNA, 38 bp, synthetic construct
  misc_feature 1..38: note = Synthetic oligonucleotide
  source 1..38: mol_type = other DNA
accgctcccttttgttcgggcttggccaatttccttga

SEQ ID NO: 3546 - DNA, 35 bp, synthetic construct
  misc_feature 1..35: note = Synthetic oligonucleotide
  source 1..35: mol_type = other DNA
aggccaattttatagcggtgactcacttttgccct

SEQ ID NO: 3547 - DNA, 38 bp, synthetic construct
  misc_feature 1..38: note = Synthetic oligonucleotide
  source 1..38: mol_type = other DNA
gggtgaggtaccttctccgtgtgattctccgtttttga

SEQ ID NO: 3548 - DNA, 38 bp, synthetic construct
  misc_feature 1..38: note = Synthetic oligonucleotide
  source 1..38: mol_type = other DNA
gaaacgtgattataccgacttgttgcttacgaatttga

SEQ ID NO: 3549 - DNA, 36 bp, synthetic construct
  misc_feature 1..36: note = Synthetic oligonucleotide
  source 1..36: mol_type = other DNA
ttgcctgagagatgccgctttgttcttcgtaatcta

SEQ ID NO: 3550 - DNA, 38 bp, synthetic construct
  misc_feature 1..38: note = Synthetic oligonucleotide
  source 1..38: mol_type = other DNA
ttctctgacccggtttttttacatatgtgacgttttga

SEQ ID NO: 3551 - DNA, 38 bp, synthetic construct
  misc_feature 1..38: note = Synthetic oligonucleotide
  source 1..38: mol_type = other DNA
tgcacctcgtaaaaaaactcgggtctggaatttcgtga

SEQ ID NO: 3552 - DNA, 38 bp, synthetic construct
  misc_feature 1..38: note = Synthetic oligonucleotide
  source 1..38: mol_type = other DNA
cataaactctccttcctgcactcttccggattacttga

SEQ ID NO: 3553 - DNA, 35 bp, synthetic construct
  misc_feature 1..35: note = Synthetic oligonucleotide
  source 1..35: mol_type = other DNA
acccgggtttgcatactgttcttctgtccttatga

SEQ ID NO: 3554 - DNA, 38 bp, synthetic construct
  misc_feature 1..38: note = Synthetic oligonucleotide
  source 1..38: mol_type = other DNA
tctgaaactagcatgagccttactgacctgatgtttga

SEQ ID NO: 3555 - DNA, 35 bp, synthetic construct
  misc_feature 1..35: note = Synthetic oligonucleotide
  source 1..35: mol_type = other DNA
tattgcccgccactttctgaatgatttgatctgct

SEQ ID NO: 3556 - DNA, 37 bp, synthetic construct
  misc_feature 1..37: note = Synthetic oligonucleotide
  source 1..37: mol_type = other DNA
gacgcaccaaattatgcaatacaaattctgcccttga

SEQ ID NO: 3557 - DNA, 35 bp, synthetic construct
  misc_feature 1..35: note = Synthetic oligonucleotide
  source 1..35: mol_type = other DNA
gggttacgttattctccggtaccttgggtttaaaa

SEQ ID NO: 3558 - DNA, 35 bp, synthetic construct
  misc_feature 1..35: note = Synthetic oligonucleotide
  source 1..35: mol_type = other DNA
gacaactcccgtgaggagtttctgattttatgttt

SEQ ID NO: 3559 - DNA, 38 bp, synthetic construct
  misc_feature 1..38: note = Synthetic oligonucleotide
  source 1..38: mol_type = other DNA
ttactagccggtggatctgcccacgttcgtttttttga

SEQ ID NO: 3560 - DNA, 38 bp, synthetic construct
  misc_feature 1..38: note = Synthetic oligonucleotide
  source 1..38: mol_type = other DNA
gcacaaattgcccggtataattgttatacgctatgtga

SEQ ID NO: 3561 - DNA, 37 bp, synthetic construct
  misc_feature 1..37: note = Synthetic oligonucleotide
  source 1..37: mol_type = other DNA
taccgaggtcgagggatttttgtttgtccttatgtga

SEQ ID NO: 3562 - DNA, 36 bp, synthetic construct
  misc_feature 1..36: note = Synthetic oligonucleotide
  source 1..36: mol_type = other DNA
aaaattgccggcgccgtagccttgttttcatcttta

SEQ ID NO: 3563 - DNA, 38 bp, synthetic construct
  misc_feature 1..38: note = Synthetic oligonucleotide
  source 1..38: mol_type = other DNA
tccgcgggccgtaatttggttagattttctgtttgtga

SEQ ID NO: 3564 - DNA, 37 bp, synthetic construct
  misc_feature 1..37: note = Synthetic oligonucleotide
  source 1..37: mol_type = other DNA
ttgcctcgctttgaccagtgttcctgtttctccttga

SEQ ID NO: 3565 - DNA, 38 bp, synthetic construct
  misc_feature 1..38: note = Synthetic oligonucleotide
  source 1..38: mol_type = other DNA
gggcggaccgcctggggttttgaaccttacaatcttga

SEQ ID NO: 3566 - DNA, 38 bp, synthetic construct
  misc_feature 1..38: note = Synthetic oligonucleotide
  source 1..38: mol_type = other DNA
gagtacgtgaccggtgaaaaatattgggatgtgtgtga

SEQ ID NO: 3567 - DNA, 37 bp, synthetic construct
  misc_feature 1..37: note = Synthetic oligonucleotide
  source 1..37: mol_type = other DNA
tttgcgcgtgagcgttataaaattttccgactaccga

SEQ ID NO: 3568 - DNA, 38 bp, synthetic construct
  misc_feature 1..38: note = Synthetic oligonucleotide
  source 1..38: mol_type = other DNA
ggtcgccttgccacaccgataatcgttgaattttgtga

SEQ ID NO: 3569 - DNA, 35 bp, synthetic construct
  misc_feature 1..35: note = Synthetic oligonucleotide
  source 1..35: mol_type = other DNA
tgccgctggacactatatatggtttctgaaatgcc

SEQ ID NO: 3570 - DNA, 38 bp, synthetic construct
  misc_feature 1..38: note = Synthetic oligonucleotide
  source 1..38: mol_type = other DNA
gagaacgcacaagttgccacgaggtttatttgccttga

SEQ ID NO: 3571 - DNA, 37 bp, synthetic construct
  misc_feature 1..37: note = Synthetic oligonucleotide
  source 1..37: mol_type = other DNA
tgccctgtaaaacctcggacggtttcctgtttgttga

SEQ ID NO: 3572 - DNA, 35 bp, synthetic construct
  misc_feature 1..35: note = Synthetic oligonucleotide
  source 1..35: mol_type = other DNA
tccatctaagattatctcgtatcacactattaaat

SEQ ID NO: 3573 - DNA, 37 bp, synthetic construct
  misc_feature 1..37: note = Synthetic oligonucleotide
  source 1..37: mol_type = other DNA
tatcaacccaaactaaccgctcaataatgaattaaga

SEQ ID NO: 3574 - DNA, 36 bp, synthetic construct
  misc_feature 1..36: note = Synthetic oligonucleotide
  source 1..36: mol_type = other DNA
agtcagtactaaactctctaaacatctggatccaaa

SEQ ID NO: 3575 - DNA, 36 bp, synthetic construct
  misc_feature 1..36: note = Synthetic oligonucleotide
  source 1..36: mol_type = other DNA
ttcgcaagtccaggatcgcgactaaataccttacaa

SEQ ID NO: 3576 - DNA, 36 bp, synthetic construct
  misc_feature 1..36: note = Synthetic oligonucleotide
  source 1..36: mol_type = other DNA
tgcctcatcccgaatagttttgtcaacccatccaca

SEQ ID NO: 3577 - DNA, 37 bp, synthetic construct
  misc_feature 1..37: note = Synthetic oligonucleotide
  source 1..37: mol_type = other DNA
acactctaccaaatagccactcgcaaacatataaaga

SEQ ID NO: 3578 - DNA, 36 bp, synthetic construct
  misc_feature 1..36: note = Synthetic oligonucleotide
  source 1..36: mol_type = other DNA
tcgtcactcactcaatatccttggtacctactcaaa

SEQ ID NO: 3579 - DNA, 36 bp, synthetic construct
  misc_feature 1..36: note = Synthetic oligonucleotide
  source 1..36: mol_type = other DNA
tgcaggcccctgtgaacacctttattgaatagcaca

SEQ ID NO: 3580 - DNA, 35 bp, synthetic construct
  misc_feature 1..35: note = Synthetic oligonucleotide
  source 1..35: mol_type = other DNA
gcactgtgacctaccactttgacctctgtttaaac

SEQ ID NO: 3581 - DNA, 36 bp, synthetic construct
  misc_feature 1..36: note = Synthetic oligonucleotide
  source 1..36: mol_type = other DNA
acctcgaccatctacaaactttgaagccacaccaaa

SEQ ID NO: 3582 - DNA, 36 bp, synthetic construct
  misc_feature 1..36: note = Synthetic oligonucleotide
  source 1..36: mol_type = other DNA
taagcctgactccatcgtctattattttttttaagc

SEQ ID NO: 3583 - DNA, 35 bp, synthetic construct
  misc_feature 1..35: note = Synthetic oligonucleotide
  source 1..35: mol_type = other DNA
atcgccacgaccaaccaccacggatcccacataaa

SEQ ID NO: 3584 - DNA, 36 bp, synthetic construct
  misc_feature 1..36: note = Synthetic oligonucleotide
  source 1..36: mol_type = other DNA
tactcgacgaaatagctaacaacggacccgataaaa

SEQ ID NO: 3585 - DNA, 37 bp, synthetic construct
  misc_feature 1..37: note = Synthetic oligonucleotide
  source 1..37: mol_type = other DNA
aaatcatccgtagtttatcctttgtctccatccaaga

SEQ ID NO: 3586 - DNA, 35 bp, synthetic construct
  misc_feature 1..35: note = Synthetic oligonucleotide
  source 1..35: mol_type = other DNA
gggaacgtaactcaggtttttttcatcccaacaca

SEQ ID NO: 3587 - DNA, 38 bp, synthetic construct
  misc_feature 1..38: note = Synthetic oligonucleotide
  source 1..38: mol_type = other DNA
aactcggccacccgtagacgtatatccaattcacttga

SEQ ID NO: 3588 - DNA, 37 bp, synthetic construct
  misc_feature 1..37: note = Synthetic oligonucleotide
  source 1..37: mol_type = other DNA
ctgcagcttgatcttcgtcacaacacatctattacga

SEQ ID NO: 3589 - DNA, 38 bp, synthetic construct
  misc_feature 1..38: note = Synthetic oligonucleotide
  source 1..38: mol_type = other DNA
ccttccaatctgcatcgctaacgcatacaccattatga

SEQ ID NO: 3590 - DNA, 38 bp, synthetic construct
  misc_feature 1..38: note = Synthetic oligonucleotide
  source 1..38: mol_type = other DNA
gatctattcaccttagccataattatagaccccaatga

SEQ ID NO: 3591 - DNA, 35 bp, synthetic construct
  misc_feature 1..35: note = Synthetic oligonucleotide
  source 1..35: mol_type = other DNA
ccgtactgtttacacatatctatccacgtattaca

SEQ ID NO: 3592 - DNA, 35 bp, synthetic construct
  misc_feature 1..35: note = Synthetic oligonucleotide
  source 1..35: mol_type = other DNA
acgtctgccaaatctactcgcattcgatacacacc

SEQ ID NO: 3593 - DNA, 35 bp, synthetic construct
  misc_feature 1..35: note = Synthetic oligonucleotide
  source 1..35: mol_type = other DNA
ctgtcgacattccgctataaaattaccaacccaat

SEQ ID NO: 3594 - DNA, 36 bp, synthetic construct
  misc_feature 1..36: note = Synthetic oligonucleotide
  source 1..36: mol_type = other DNA
gagtacgcaattattatccgaagtcaactatagcaa

SEQ ID NO: 3595 - DNA, 36 bp, synthetic construct
  misc_feature 1..36: note = Synthetic oligonucleotide
  source 1..36: mol_type = other DNA
gagtaactagtcatcaattctatcttcgcacactaa

SEQ ID NO: 3596 - DNA, 35 bp, synthetic construct
  misc_feature 1..35: note = Synthetic oligonucleotide
  source 1..35: mol_type = other DNA
atgcgctactgcctagctcccgctcgcccatataa

SEQ ID NO: 3597 - DNA, 36 bp, synthetic construct
  misc_feature 1..36: note = Synthetic oligonucleotide
  source 1..36: mol_type = other DNA
acaatatcgatctccaaaactatctcgtgtatctca

SEQ ID NO: 3598 - DNA, 38 bp, synthetic construct
  misc_feature 1..38: note = Synthetic oligonucleotide
  source 1..38: mol_type = other DNA
acgtacccgaccccggcgttaagccgtctttgtactga

SEQ ID NO: 3599 - DNA, 35 bp, synthetic construct
  misc_feature 1..35: note = Synthetic oligonucleotide
  source 1..35: mol_type = other DNA
gtcactcattatatggttctacactacgatcatca

SEQ ID NO: 3600 - DNA, 36 bp, synthetic construct
  misc_feature 1..36: note = Synthetic oligonucleotide
  source 1..36: mol_type = other DNA
gactccgtcgttcatttcactaacacgtatgccaga

SEQ ID NO: 3601 - DNA, 36 bp, synthetic construct
  misc_feature 1..36: note = Synthetic oligonucleotide
  source 1..36: mol_type = other DNA
tagtacccacttattactatcggagttcaaacataa

SEQ ID NO: 3602 - DNA, 36 bp, synthetic construct
  misc_feature 1..36: note = Synthetic oligonucleotide
  source 1..36: mol_type = other DNA
tcgagcgcacagattcgttttccaccgcgaacttca

SEQ ID NO: 3603 - DNA, 37 bp, synthetic construct
  misc_feature 1..37: note = Synthetic oligonucleotide
  source 1..37: mol_type = other DNA
gccacgtttcctactttcgttcgttcgccacgtagga

SEQ ID NO: 3604 - DNA, 35 bp, synthetic construct
  misc_feature 1..35: note = Synthetic oligonucleotide
  source 1..35: mol_type = other DNA
tcactgacccacctctcgatccccaattaaatatt

SEQ ID NO: 3605 - DNA, 36 bp, synthetic construct
  misc_feature 1..36: note = Synthetic oligonucleotide
  source 1..36: mol_type = other DNA
cgcttcccgaatcgagagatcaagcgatcagccgta

SEQ ID NO: 3606 - DNA, 37 bp, synthetic construct
  misc_feature 1..37: note = Synthetic oligonucleotide
  source 1..37: mol_type = other DNA
tcttacgtacgcttcgtagacaattattcatttctga

SEQ ID NO: 3607 - DNA, 38 bp, synthetic construct
  misc_feature 1..38: note = Synthetic oligonucleotide
  source 1..38: mol_type = other DNA
tgctacacgaaacctgtactgctagctatctatcatga

SEQ ID NO: 3608 - DNA, 36 bp, synthetic construct
  misc_feature 1..36: note = Synthetic oligonucleotide
  source 1..36: mol_type = other DNA
ctagctcttcagtcgcactcctagtctcaccattca

SEQ ID NO: 3609 - DNA, 35 bp, synthetic construct
  misc_feature 1..35: note = Synthetic oligonucleotide
  source 1..35: mol_type = other DNA
tgaccattagttaactctatcttttgaaataatct

SEQ ID NO: 3610 - DNA, 36 bp, synthetic construct
  misc_feature 1..36: note = Synthetic oligonucleotide
  source 1..36: mol_type = other DNA
agcctcataggcattccggtgtcacgcaaacacata

SEQ ID NO: 3611 - DNA, 38 bp, synthetic construct
  misc_feature 1..38: note = Synthetic oligonucleotide
  source 1..38: mol_type = other DNA
tgccgtcccgggactcaatccacgtttttattttctca

SEQ ID NO: 3612 - DNA, 38 bp, synthetic construct
  misc_feature 1..38: note = Synthetic oligonucleotide
  source 1..38: mol_type = other DNA
tgccgctaaggcagttactacagggtcttattacatga

SEQ ID NO: 3613 - DNA, 35 bp, synthetic construct
  misc_feature 1..35: note = Synthetic oligonucleotide
  source 1..35: mol_type = other DNA
gaccccttgttaaatgtatccttgttaattacgat

SEQ ID NO: 3614 - DNA, 36 bp, synthetic construct
  misc_feature 1..36: note = Synthetic oligonucleotide
  source 1..36: mol_type = other DNA
caaccgtcctctaatttcacgcctgtcggtcattca

SEQ ID NO: 3615 - DNA, 38 bp, synthetic construct
  misc_feature 1..38: note = Synthetic oligonucleotide
  source 1..38: mol_type = other DNA
ctacaccactattcaaaacgaatatctcatcatactga

SEQ ID NO: 3616 - DNA, 36 bp, synthetic construct
  misc_feature 1..36: note = Synthetic oligonucleotide
  source 1..36: mol_type = other DNA
ttgtacctgcactgcctcaagttattacatctcata

SEQ ID NO: 3617 - DNA, 38 bp, synthetic construct
  misc_feature 1..38: note = Synthetic oligonucleotide
  source 1..38: mol_type = other DNA
taggcgagagcctttgacaggttaccaggtggtggtga

SEQ ID NO: 3618 - DNA, 37 bp, synthetic construct
  misc_feature 1..37: note = Synthetic oligonucleotide
  source 1..37: mol_type = other DNA
agtgactgcgcaaatcactacaacttccatccaaaga

SEQ ID NO: 3619 - DNA, 37 bp, synthetic construct
  misc_feature 1..37: note = Synthetic oligonucleotide
  source 1..37: mol_type = other DNA
gagtgactgctttgacctatacacacaaccaacttaa

SEQ ID NO: 3620 - DNA, 36 bp, synthetic construct
  misc_feature 1..36: note = Synthetic oligonucleotide
  source 1..36: mol_type = other DNA
atttaaccctaaatatttcaacacacaaacaccaca

SEQ ID NO: 3621 - DNA, 38 bp, synthetic construct
  misc_feature 1..38: note = Synthetic oligonucleotide
  source 1..38: mol_type = other DNA
ctctggactgcaacacagtgccgttccgaccttcttga

SEQ ID NO: 3622 - DNA, 36 bp, synthetic construct
  misc_feature 1..36: note = Synthetic oligonucleotide
  source 1..36: mol_type = other DNA
tacttagtcttcttcggatcgcgaccgtggtcggta

SEQ ID NO: 3623 - DNA, 35 bp, synthetic construct
  misc_feature 1..35: note = Synthetic oligonucleotide
  source 1..35: mol_type = other DNA
atatcgtacctattttctaatcttacgctgttcac

SEQ ID NO: 3624 - DNA, 38 bp, synthetic construct
  misc_feature 1..38: note = Synthetic oligonucleotide
  source 1..38: mol_type = other DNA
cccccgcaccacattattccgatcatattatccattga

SEQ ID NO: 3625 - DNA, 35 bp, synthetic construct
  misc_feature 1..35: note = Synthetic oligonucleotide
  source 1..35: mol_type = other DNA
acttaatattccattctcaattacactattcggtt

SEQ ID NO: 3626 - DNA, 38 bp, synthetic construct
  misc_feature 1..38: note = Synthetic oligonucleotide
  source 1..38: mol_type = other DNA
ttcgtcactgctacttttatattaagcccatagaatga

SEQ ID NO: 3627 - DNA, 36 bp, synthetic construct
  misc_feature 1..36: note = Synthetic oligonucleotide
  source 1..36: mol_type = other DNA
cctcgcatccgacttttacaatcacataatcacgta

SEQ ID NO: 3628 - DNA, 36 bp, synthetic construct
  misc_feature 1..36: note = Synthetic oligonucleotide
  source 1..36: mol_type = other DNA
ttgaaagcccctcaatggccacctattttgcattca

SEQ ID NO: 3629 - DNA, 36 bp, synthetic construct
  misc_feature 1..36: note = Synthetic oligonucleotide
  source 1..36: mol_type = other DNA
gagtactgtctctattccacaagcataactacttca

SEQ ID NO: 3630 - DNA, 38 bp, synthetic construct
  misc_feature 1..38: note = Synthetic oligonucleotide
  source 1..38: mol_type = other DNA
aggcgactgccgcagtgccgctgtccgtttcatcatga

SEQ ID NO: 3631 - DNA, 38 bp, synthetic construct
  misc_feature 1..38: note = Synthetic oligonucleotide
  source 1..38: mol_type = other DNA
aatgccaagtcttatcgctagcaataatattgaactga

SEQ ID NO: 3632 - DNA, 36 bp, synthetic construct
  misc_feature 1..36: note = Synthetic oligonucleotide
  source 1..36: mol_type = other DNA
atcccctgtctgcatgcaggcctatgaccgcactca

SEQ ID NO: 3633 - DNA, 37 bp, synthetic construct
  misc_feature 1..37: note = Synthetic oligonucleotide
  source 1..37: mol_type = other DNA
gggggcgggagctacgcaagcatgcctttgacattga

SEQ ID NO: 3634 - DNA, 38 bp, synthetic construct
  misc_feature 1..38: note = Synthetic oligonucleotide
  source 1..38: mol_type = other DNA
taatttctctgcatctatctcaaagcaccactatctta

SEQ ID NO: 3635 - DNA, 36 bp, synthetic construct
  misc_feature 1..36: note = Synthetic oligonucleotide
  source 1..36: mol_type = other DNA
acccatctaccgcattattaacgttataaccctaaa

SEQ ID NO: 3636 - DNA, 37 bp, synthetic construct
  misc_feature 1..37: note = Synthetic oligonucleotide
  source 1..37: mol_type = other DNA
cctgcctatcgccccttcatattctcagatcagcaga

SEQ ID NO: 3637 - DNA, 36 bp, synthetic construct
  misc_feature 1..36: note = Synthetic oligonucleotide
  source 1..36: mol_type = other DNA
ttctcgtctcggggctaatacacatacaattataca

SEQ ID NO: 3638 - DNA, 35 bp, synthetic construct
  misc_feature 1..35: note = Synthetic oligonucleotide
  source 1..35: mol_type = other DNA
gctcattctattttagcatatcatccatctaatcg

SEQ ID NO: 3639 - DNA, 35 bp, synthetic construct
  misc_feature 1..35: note = Synthetic oligonucleotide
  source 1..35: mol_type = other DNA
aatccgtcatgtattaaacacttctatcacattcg

SEQ ID NO: 3640 - DNA, 37 bp, synthetic construct
  misc_feature 1..37: note = Synthetic oligonucleotide
  source 1..37: mol_type = other DNA
actcttctgaatcgaaaccaatctcactttcagggga

SEQ ID NO: 3641 - DNA, 36 bp, synthetic construct
  misc_feature 1..36: note = Synthetic oligonucleotide
  source 1..36: mol_type = other DNA
ctaccatcacatcctatcatcgcatttagtcttgta

SEQ ID NO: 3642 - DNA, 35 bp, synthetic construct
  misc_feature 1..35: note = Synthetic oligonucleotide
  source 1..35: mol_type = other DNA
ctaatcatctcttcaaattcaacggcgaacaaaac

SEQ ID NO: 3643 - DNA, 38 bp, synthetic construct
  misc_feature 1..38: note = Synthetic oligonucleotide
  source 1..38: mol_type = other DNA
taagcacttccgttttaatctttacgacgcacccatga

SEQ ID NO: 3644 - DNA, 36 bp, synthetic construct
  misc_feature 1..36: note = Synthetic oligonucleotide
  source 1..36: mol_type = other DNA
tactatcggcacttctacggaggataccctcgatta

SEQ ID NO: 3645 - DNA, 35 bp, synthetic construct
  misc_feature 1..35: note = Synthetic oligonucleotide
  source 1..35: mol_type = other DNA
tgagctgccgctatggtgaccttctatcccattat

SEQ ID NO: 3646 - DNA, 36 bp, synthetic construct
  misc_feature 1..36: note = Synthetic oligonucleotide
  source 1..36: mol_type = other DNA
ccttacagacggtcaccgtcttgcgggttattacaa

SEQ ID NO: 3647 - DNA, 36 bp, synthetic construct
  misc_feature 1..36: note = Synthetic oligonucleotide
  source 1..36: mol_type = other DNA
ccagtcagtctgttactgtcttgttcccatccctca

SEQ ID NO: 3648 - DNA, 36 bp, synthetic construct
  misc_feature 1..36: note = Synthetic oligonucleotide
  source 1..36: mol_type = other DNA
cgtttccacacgccgattcaaatccctcattaacca

SEQ ID NO: 3649 - DNA, 35 bp, synthetic construct
  misc_feature 1..35: note = Synthetic oligonucleotide
  source 1..35: mol_type = other DNA
acctaacatcctatcaccgcttatgtattgcatca

SEQ ID NO: 3650 - DNA, 35 bp, synthetic construct
  misc_feature 1..35: note = Synthetic oligonucleotide
  source 1..35: mol_type = other DNA
gcagtaggttgtgatgctagctaattatactatac

SEQ ID NO: 3651 - DNA, 38 bp, synthetic construct
  misc_feature 1..38: note = Synthetic oligonucleotide
  source 1..38: mol_type = other DNA
cccgccgcacgtccaatattcaaccatgaccttactga

SEQ ID NO: 3652 - DNA, 35 bp, synthetic construct
  misc_feature 1..35: note = Synthetic oligonucleotide
  source 1..35: mol_type = other DNA
atcgccatcatcgctttatctggtcgtgggaaccc

SEQ ID NO: 3653 - DNA, 36 bp, synthetic construct
  misc_feature 1..36: note = Synthetic oligonucleotide
  source 1..36: mol_type = other DNA
tgtcatccgttatttcattcaccttctactatgtaa

SEQ ID NO: 3654 - DNA, 37 bp, synthetic construct
  misc_feature 1..37: note = Synthetic oligonucleotide
  source 1..37: mol_type = other DNA
tactattatcatccacgccatcagccgggtcttcgga

SEQ ID NO: 3655 - DNA, 38 bp, synthetic construct
  misc_feature 1..38: note = Synthetic oligonucleotide
  source 1..38: mol_type = other DNA
ccttacatacatactccgcatacgtgcctatttaatga

SEQ ID NO: 3656 - DNA, 37 bp, synthetic construct
  misc_feature 1..37: note = Synthetic oligonucleotide
  source 1..37: mol_type = other DNA
acaactatcaaataaacctgcgccctctattaatgga

SEQ ID NO: 3657 - DNA, 35 bp, synthetic construct
  misc_feature 1..35: note = Synthetic oligonucleotide
  source 1..35: mol_type = other DNA
gcaccatcgccggactgctcatatccccgttgtaa

SEQ ID NO: 3658 - DNA, 37 bp, synthetic construct
  misc_feature 1..37: note = Synthetic oligonucleotide
  source 1..37: mol_type = other DNA
ctcgcagtaatggtgcccacatgttacgtctctttga

SEQ ID NO: 3659 - DNA, 36 bp, synthetic construct
  misc_feature 1..36: note = Synthetic oligonucleotide
  source 1..36: mol_type = other DNA
ttagtactgtcattcgaggattcgaatctagcttta

SEQ ID NO: 3660 - DNA, 36 bp, synthetic construct
  misc_feature 1..36: note = Synthetic oligonucleotide
  source 1..36: mol_type = other DNA
tgtaaacgtacgatattacttccgatccatacatca

SEQ ID NO: 3661 - DNA, 37 bp, synthetic construct
  misc_feature 1..37: note = Synthetic oligonucleotide
  source 1..37: mol_type = other DNA
attcaagcaatctagtaattattctttcactgccgga

SEQ ID NO: 3662 - DNA, 38 bp, synthetic construct
  misc_feature 1..38: note = Synthetic oligonucleotide
  source 1..38: mol_type = other DNA
taccatctctattccacgtccacgacacgctgccatga

SEQ ID NO: 3663 - DNA, 36 bp, synthetic construct
  misc_feature 1..36: note = Synthetic oligonucleotide
  source 1..36: mol_type = other DNA
tgttgacaatgccgctgtcccgtctacccttcgata

SEQ ID NO: 3664 - DNA, 35 bp, synthetic construct
  misc_feature 1..35: note = Synthetic oligonucleotide
  source 1..35: mol_type = other DNA
catgtcgccgtcgcgcacagcctacatcccactta

SEQ ID NO: 3665 - DNA, 35 bp, synthetic construct
  misc_feature 1..35: note = Synthetic oligonucleotide
  source 1..35: mol_type = other DNA
gagtacttctcataaacgaaatatcaaattcgaat

SEQ ID NO: 3666 - DNA, 38 bp, synthetic construct
  misc_feature 1..38: note = Synthetic oligonucleotide
  source 1..38: mol_type = other DNA
tgactgcgaaactaacgtatccccatatatacaattga

SEQ ID NO: 3667 - DNA, 36 bp, synthetic construct
  misc_feature 1..36: note = Synthetic oligonucleotide
  source 1..36: mol_type = other DNA
ttcagcgcgttcttcacagcggggtagcactcatca

SEQ ID NO: 3668 - DNA, 35 bp, synthetic construct
  misc_feature 1..35: note = Synthetic oligonucleotide
  source 1..35: mol_type = other DNA
tcagtacatcattaatcaccatatcacgcattatc

SEQ ID NO: 3669 - DNA, 36 bp, synthetic construct
  misc_feature 1..36: note = Synthetic oligonucleotide
  source 1..36: mol_type = other DNA
agtctactgcatcatctcccttactccaagtagtaa

SEQ ID NO: 3670 - DNA, 36 bp, synthetic construct
  misc_feature 1..36: note = Synthetic oligonucleotide
  source 1..36: mol_type = other DNA
gctcatactcagcactgcgaattgccagtccttcac

SEQ ID NO: 3671 - DNA, 38 bp, synthetic construct
  misc_feature 1..38: note = Synthetic oligonucleotide
  source 1..38: mol_type = other DNA
gctgcatctcgtcactccaggtggttggtacattgtga

SEQ ID NO: 3672 - DNA, 35 bp, synthetic construct
  misc_feature 1..35: note = Synthetic oligonucleotide
  source 1..35: mol_type = other DNA
gttagctagaacgaacgcacgtcttctatctttta

SEQ ID NO: 3673 - DNA, 36 bp, synthetic construct
  misc_feature 1..36: note = Synthetic oligonucleotide
  source 1..36: mol_type = other DNA
ttcgttattgccttagttacactctattataggtta

SEQ ID NO: 3674 - DNA, 37 bp, synthetic construct
  misc_feature 1..37: note = Synthetic oligonucleotide
  source 1..37: mol_type = other DNA
tatcggacacttactacattaccgtcgcttataccga

SEQ ID NO: 3675 - DNA, 38 bp, synthetic construct
  misc_feature 1..38: note = Synthetic oligonucleotide
  source 1..38: mol_type = other DNA
atcaacgtactcgaacgcgtccacaccccaccatctga

SEQ ID NO: 3676 - DNA, 38 bp, synthetic construct
  misc_feature 1..38: note = Synthetic oligonucleotide
  source 1..38: mol_type = other DNA
gagctactctgaatctcattgatatctacaataaatga

SEQ ID NO: 3677 - DNA, 36 bp, synthetic construct
  misc_feature 1..36: note = Synthetic oligonucleotide
  source 1..36: mol_type = other DNA
taataggacggcgggctcttgccgatatttcctgta

SEQ ID NO: 3678 - DNA, 35 bp, synthetic construct
  misc_feature 1..35: note = Synthetic oligonucleotide
  source 1..35: mol_type = other DNA
catcttatacagctcagcctctattcccatacgtc

SEQ ID NO: 3679 - DNA, 36 bp, synthetic construct
  misc_feature 1..36: note = Synthetic oligonucleotide
  source 1..36: mol_type = other DNA
ctgccggatcttgcacgcactgctattatatttcca

SEQ ID NO: 3680 - DNA, 35 bp, synthetic construct
  misc_feature 1..35: note = Synthetic oligonucleotide
  source 1..35: mol_type = other DNA
actgcctaaggctatcgcatcaatatgaactcaac

SEQ ID NO: 3681 - DNA, 37 bp, synthetic construct
  misc_feature 1..37: note = Synthetic oligonucleotide
  source 1..37: mol_type = other DNA
ctactgcacgacgcgagtccttatcaatatctcacga

SEQ ID NO: 3682 - DNA, 35 bp, synthetic construct
  misc_feature 1..35: note = Synthetic oligonucleotide
  source 1..35: mol_type = other DNA
gagtacttacgtaacgagttattaatgtccaaaat

SEQ ID NO: 3683 - DNA, 36 bp, synthetic construct
  misc_feature 1..36: note = Synthetic oligonucleotide
  source 1..36: mol_type = other DNA
aaggactcaatgccactatacgacttattccaatca

SEQ ID NO: 3684 - DNA, 35 bp, synthetic construct
  misc_feature 1..35: note = Synthetic oligonucleotide
  source 1..35: mol_type = other DNA
cttttctagctagcatttacacttttatacacaac

SEQ ID NO: 3685 - DNA, 37 bp, synthetic construct
  misc_feature 1..37: note = Synthetic oligonucleotide
  source 1..37: mol_type = other DNA
tcgggttctccctctcgccacctaggtttaaaacgga

SEQ ID NO: 3686 - DNA, 38 bp, synthetic construct
  misc_feature 1..38: note = Synthetic oligonucleotide
  source 1..38: mol_type = other DNA
cgcatgcactgaacatatacacatctcgtcgctcctga

SEQ ID NO: 3687 - DNA, 36 bp, synthetic construct
  misc_feature 1..36: note = Synthetic oligonucleotide
  source 1..36: mol_type = other DNA
ttacctctctacaccatttaccaacggctacgccga

SEQ ID NO: 3688 - DNA, 38 bp, synthetic construct
  misc_feature 1..38: note = Synthetic oligonucleotide
  source 1..38: mol_type = other DNA
gacgtcttctttcacagcatgccgtaacagttttctga

SEQ ID NO: 3689 - DNA, 35 bp, synthetic construct
  misc_feature 1..35: note = Synthetic oligonucleotide
  source 1..35: mol_type = other DNA
ctacagactaactagttcccgaattctgccacaac

SEQ ID NO: 3690 - DNA, 37 bp, synthetic construct
  misc_feature 1..37: note = Synthetic oligonucleotide
  source 1..37: mol_type = other DNA
aatccacgtgcccaacataaagatctaactcacaaga

SEQ ID NO: 3691 - DNA, 36 bp, synthetic construct
  misc_feature 1..36: note = Synthetic oligonucleotide
  source 1..36: mol_type = other DNA
tacgacgcctctgttaatccgtttttatataccaca

SEQ ID NO: 3692 - DNA, 38 bp, synthetic construct
  misc_feature 1..38: note = Synthetic oligonucleotide
  source 1..38: mol_type = other DNA
ggcgggaatcacgccaaacctctgtcacctatcgctga

SEQ ID NO: 3693 - DNA, 38 bp, synthetic construct
  misc_feature 1..38: note = Synthetic oligonucleotide
  source 1..38: mol_type = other DNA
cttctgccacttcatctcgtcaaggttcatttcgttga

SEQ ID NO: 3694 - DNA, 36 bp, synthetic construct
  misc_feature 1..36: note = Synthetic oligonucleotide
  source 1..36: mol_type = other DNA
cgcacaacgtaccggtccagggaacacattttcgca

SEQ ID NO: 3695 - DNA, 38 bp, synthetic construct
  misc_feature 1..38: note = Synthetic oligonucleotide
  source 1..38: mol_type = other DNA
ctctcaccagcacgtcccacacattttcacaaacctga

SEQ ID NO: 3696 - DNA, 38 bp, synthetic construct
  misc_feature 1..38: note = Synthetic oligonucleotide
  source 1..38: mol_type = other DNA
tttctcgcgcggcaggcatccgttctaatataccatga

SEQ ID NO: 3697 - DNA, 36 bp, synthetic construct
  misc_feature 1..36: note = Synthetic oligonucleotide
  source 1..36: mol_type = other DNA
accacaacttatcgcatctcattgattggactaata

SEQ ID NO: 3698 - DNA, 35 bp, synthetic construct
  misc_feature 1..35: note = Synthetic oligonucleotide
  source 1..35: mol_type = other DNA
tcccctcagccatcgtggaacaactgcggtgtttc

SEQ ID NO: 3699 - DNA, 36 bp, synthetic construct
  misc_feature 1..36: note = Synthetic oligonucleotide
  source 1..36: mol_type = other DNA
atacgtctgcgattatttagtggtctctcacacata

SEQ ID NO: 3700 - DNA, 36 bp, synthetic construct
  misc_feature 1..36: note = Synthetic oligonucleotide
  source 1..36: mol_type = other DNA
cacgagtcgccacacctcagctgatgctcacctaca

SEQ ID NO: 3701 - DNA, 36 bp, synthetic construct
  misc_feature 1..36: note = Synthetic oligonucleotide
  source 1..36: mol_type = other DNA
agctacgtaccgaatttcgttcataataggtaatga

SEQ ID NO: 3702 - DNA, 35 bp, synthetic construct
  misc_feature 1..35: note = Synthetic oligonucleotide
  source 1..35: mol_type = other DNA
acacattcggccatgtcatcctgcacttcacgtga

SEQ ID NO: 3703 - DNA, 38 bp, synthetic construct
  misc_feature 1..38: note = Synthetic oligonucleotide
  source 1..38: mol_type = other DNA
taaccatcgatcccaacacatgtcagcacggcacctga

SEQ ID NO: 3704 - DNA, 35 bp, synthetic construct
  misc_feature 1..35: note = Synthetic oligonucleotide
  source 1..35: mol_type = other DNA
tacctagtccggccaccagtctcccacacattacg

SEQ ID NO: 3705 - DNA, 35 bp, synthetic construct
  misc_feature 1..35: note = Synthetic oligonucleotide
  source 1..35: mol_type = other DNA
atgtctgcggaccatctatcggatcgccgaacctt

SEQ ID NO: 3706 - DNA, 37 bp, synthetic construct
  misc_feature 1..37: note = Synthetic oligonucleotide
  source 1..37: mol_type = other DNA
cgcacttaccatgcgtatcctttatcggtctgaacga

SEQ ID NO: 3707 - DNA, 37 bp, synthetic construct
  misc_feature 1..37: note = Synthetic oligonucleotide
  source 1..37: mol_type = other DNA
gagtcccggtcccccgggtccatcatctactccatga

SEQ ID NO: 3708 - DNA, 37 bp, synthetic construct
  misc_feature 1..37: note = Synthetic oligonucleotide
  source 1..37: mol_type = other DNA
atctgctgttgtctttcccattagttatcccaatcga

SEQ ID NO: 3709 - DNA, 38 bp, synthetic construct
  misc_feature 1..38: note = Synthetic oligonucleotide
  source 1..38: mol_type = other DNA
agccacacctaatagctcacatccggttaccgtcctga

SEQ ID NO: 3710 - DNA, 38 bp, synthetic construct
  misc_feature 1..38: note = Synthetic oligonucleotide
  source 1..38: mol_type = other DNA
ccggctcagagccacgctatatcttcactactaactga

SEQ ID NO: 3711 - DNA, 37 bp, synthetic construct
  misc_feature 1..37: note = Synthetic oligonucleotide
  source 1..37: mol_type = other DNA
gcgaagtttcacttccagtttctgacgcccttcatga

SEQ ID NO: 3712 - DNA, 36 bp, synthetic construct
  misc_feature 1..36: note = Synthetic oligonucleotide
  source 1..36: mol_type = other DNA
tcctaggctgctcttcgccgcacaccggacttcaca

SEQ ID NO: 3713 - DNA, 38 bp, synthetic construct
  misc_feature 1..38: note = Synthetic oligonucleotide
  source 1..38: mol_type = other DNA
catgcaccggtctcacggtcgcataataactatcatta

SEQ ID NO: 3714 - DNA, 38 bp, synthetic construct
  misc_feature 1..38: note = Synthetic oligonucleotide
  source 1..38: mol_type = other DNA
tgtcaatatctgaatcggtggatattggcggaggttga

SEQ ID NO: 3715 - DNA, 37 bp, synthetic construct
  misc_feature 1..37: note = Synthetic oligonucleotide
  source 1..37: mol_type = other DNA
gggtaccgtgcagactcacagaacctaatatatagga

SEQ ID NO: 3716 - DNA, 37 bp, synthetic construct
  misc_feature 1..37: note = Synthetic oligonucleotide
  source 1..37: mol_type = other DNA
tttaccctgcatcgatcgcgagacccaccaatcatga

SEQ ID NO: 3717 - DNA, 37 bp, synthetic construct
  misc_feature 1..37: note = Synthetic oligonucleotide
  source 1..37: mol_type = other DNA
tggcggcccttctaccgcccgtcaccacctctatgga

SEQ ID NO: 3718 - DNA, 36 bp, synthetic construct
  misc_feature 1..36: note = Synthetic oligonucleotide
  source 1..36: mol_type = other DNA
tacaccaataaccatacaactacatctaatacgtta

SEQ ID NO: 3719 - DNA, 37 bp, synthetic construct
  misc_feature 1..37: note = Synthetic oligonucleotide
  source 1..37: mol_type = other DNA
gagtactcgtgatcttttacacacatctgcctaaaga

SEQ ID NO: 3720 - DNA, 36 bp, synthetic construct
  misc_feature 1..36: note = Synthetic oligonucleotide
  source 1..36: mol_type = other DNA
agcaccggaatgcccgggcccttgtacgcctagtga

SEQ ID NO: 3721 - DNA, 35 bp, synthetic construct
  misc_feature 1..35: note = Synthetic oligonucleotide
  source 1..35: mol_type = other DNA
ttaagtcatctgcactagtacgccctatattaaaa

SEQ ID NO: 3722 - DNA, 37 bp, synthetic construct
  misc_feature 1..37: note = Synthetic oligonucleotide
  source 1..37: mol_type = other DNA
agtctcgcagaaaaaatctatttcccatttgactgga

SEQ ID NO: 3723 - DNA, 36 bp, synthetic construct
  misc_feature 1..36: note = Synthetic oligonucleotide
  source 1..36: mol_type = other DNA
aggaactgcctaccatcgatttttaataccacacga

SEQ ID NO: 3724 - DNA, 36 bp, synthetic construct
  misc_feature 1..36: note = Synthetic oligonucleotide
  source 1..36: mol_type = other DNA
tttcttcttatgagggggaggtgcggttcggaataa

SEQ ID NO: 3725 - DNA, 36 bp, synthetic construct
  misc_feature 1..36: note = Synthetic oligonucleotide
  source 1..36: mol_type = other DNA
gccaggattcggccattttacctatctcgatttaaa

SEQ ID NO: 3726 - DNA, 38 bp, synthetic construct
  misc_feature 1..38: note = Synthetic oligonucleotide
  source 1..38: mol_type = other DNA
cgtgccgaacaactcacacgctacacctttatttttaa

SEQ ID NO: 3727 - DNA, 36 bp, synthetic construct
  misc_feature 1..36: note = Synthetic oligonucleotide
  source 1..36: mol_type = other DNA
agactatcataactccttcacgaaccttccacataa

SEQ ID NO: 3728 - DNA, 37 bp, synthetic construct
  misc_feature 1..37: note = Synthetic oligonucleotide
  source 1..37: mol_type = other DNA
tcaccgaccctcagtacttcccctgcgcatgactaga

SEQ ID NO: 3729 - DNA, 35 bp, synthetic construct
  misc_feature 1..35: note = Synthetic oligonucleotide
  source 1..35: mol_type = other DNA
tctcactactacccactaaaatcggttgatactac

SEQ ID NO: 3730 - DNA, 35 bp, synthetic construct
  misc_feature 1..35: note = Synthetic oligonucleotide
  source 1..35: mol_type = other DNA
acgcacgggtatgcatcattgatggtttccggtac

SEQ ID NO: 3731 - DNA, 38 bp, synthetic construct
  misc_feature 1..38: note = Synthetic oligonucleotide
  source 1..38: mol_type = other DNA
acgttcctgtacgccgcgggcggtattttcacaattga

SEQ ID NO: 3732 - DNA, 38 bp, synthetic construct
  misc_feature 1..38: note = Synthetic oligonucleotide
  source 1..38: mol_type = other DNA
tcgccctatcaactccctgtattttcatccctcaatca

SEQ ID NO: 3733 - DNA, 35 bp, synthetic construct
  misc_feature 1..35: note = Synthetic oligonucleotide
  source 1..35: mol_type = other DNA
cgcctacgatcacttccccgcgcgactgtctcatc

SEQ ID NO: 3734 - DNA, 37 bp, synthetic construct
  misc_feature 1..37: note = Synthetic oligonucleotide
  source 1..37: mol_type = other DNA
cacaacatatctactctatactagctcaattcaccga

SEQ ID NO: 3735 - DNA, 36 bp, synthetic construct
  misc_feature 1..36: note = Synthetic oligonucleotide
  source 1..36: mol_type = other DNA
cattgcgaccttatcccaccacgaattgccactaaa

SEQ ID NO: 3736 - DNA, 35 bp, synthetic construct
  misc_feature 1..35: note = Synthetic oligonucleotide
  source 1..35: mol_type = other DNA
ttactatccagtatcacaccgaccttccaatccga

SEQ ID NO: 3737 - DNA, 37 bp, synthetic construct
  misc_feature 1..37: note = Synthetic oligonucleotide
  source 1..37: mol_type = other DNA
agaacttgatcgtttctggggtttgggaatcatgtga

SEQ ID NO: 3738 - DNA, 35 bp, synthetic construct
  misc_feature 1..35: note = Synthetic oligonucleotide
  source 1..35: mol_type = other DNA
gggcttgcaaacaacttcacgtatgatccgcacct

SEQ ID NO: 3739 - DNA, 35 bp, synthetic construct
  misc_feature 1..35: note = Synthetic oligonucleotide
  source 1..35: mol_type = other DNA
aatcccgtgagggtcgtttcaagtttcaataatcc

SEQ ID NO: 3740 - DNA, 37 bp, synthetic construct
  misc_feature 1..37: note = Synthetic oligonucleotide
  source 1..37: mol_type = other DNA
ggcttacacagccacctatctttggccaatttataga

SEQ ID NO: 3741 - DNA, 36 bp, synthetic construct
  misc_feature 1..36: note = Synthetic oligonucleotide
  source 1..36: mol_type = other DNA
agcgccttaggcttccttctgcggctaaccatcata

SEQ ID NO: 3742 - DNA, 35 bp, synthetic construct
  misc_feature 1..35: note = Synthetic oligonucleotide
  source 1..35: mol_type = other DNA
gaattagctcacttactatttcattttgaccataa

SEQ ID NO: 3743 - DNA, 35 bp, synthetic construct
  misc_feature 1..35: note = Synthetic oligonucleotide
  source 1..35: mol_type = other DNA
ggccttccccttcatccgcctcaacgctggccacc

SEQ ID NO: 3744 - DNA, 36 bp, synthetic construct
  misc_feature 1..36: note = Synthetic oligonucleotide
  source 1..36: mol_type = other DNA
aggcaggcgactacggatcaacatttctatacccta

SEQ ID NO: 3745 - DNA, 36 bp, synthetic construct
  misc_feature 1..36: note = Synthetic oligonucleotide
  source 1..36: mol_type = other DNA
gttagtgcgtattgtaggctgacgaacgctaccgta

SEQ ID NO: 3746 - DNA, 36 bp, synthetic construct
  misc_feature 1..36: note = Synthetic oligonucleotide
  source 1..36: mol_type = other DNA
gcggcccggcgatcctctagtccaaccggtctacta

SEQ ID NO: 3747 - DNA, 38 bp, synthetic construct
  misc_feature 1..38: note = Synthetic oligonucleotide
  source 1..38: mol_type = other DNA
gggggggcacgtacgacattaggtccttaaatcactca

SEQ ID NO: 3748 - DNA, 36 bp, synthetic construct
  misc_feature 1..36: note = Synthetic oligonucleotide
  source 1..36: mol_type = other DNA
taaccgcgtacggactcaagccacccctattaaaca

SEQ ID NO: 3749 - DNA, 35 bp, synthetic construct
  misc_feature 1..35: note = Synthetic oligonucleotide
  source 1..35: mol_type = other DNA
gctatttgttaagtccagtcgcaaatcaccactat

SEQ ID NO: 3750 - DNA, 36 bp, synthetic construct
  misc_feature 1..36: note = Synthetic oligonucleotide
  source 1..36: mol_type = other DNA
ccgggcactcggactttcactctgtcagtttctaca

SEQ ID NO: 3751 - DNA, 36 bp, synthetic construct
  misc_feature 1..36: note = Synthetic oligonucleotide
  source 1..36: mol_type = other DNA
tcgcaatatatatctccgtggtgtaccatcagtcaa

SEQ ID NO: 3752 - DNA, 35 bp, synthetic construct
  misc_feature 1..35: note = Synthetic oligonucleotide
  source 1..35: mol_type = other DNA
ccctctactggcttctacgtcgcacgactgctacc

SEQ ID NO: 3753 - DNA, 34 bp, synthetic construct
  misc_feature 1..34: note = Synthetic oligonucleotide
  source 1..34: mol_type = other DNA
aacctcacatgctggcgatcactagcaaaccacc

SEQ ID NO: 3754 - DNA, 38 bp, synthetic construct
  misc_feature 1..38: note = Synthetic oligonucleotide
  source 1..38: mol_type = other DNA
aaactgccttgaacaagtttcgatatcacattccatga

SEQ ID NO: 3755 - DNA, 35 bp, synthetic construct
  misc_feature 1..35: note = Synthetic oligonucleotide
  source 1..35: mol_type = other DNA
cctcataaccgattaccaacgccatcaaaatatag

SEQ ID NO: 3756 - DNA, 36 bp, synthetic construct
  misc_feature 1..36: note = Synthetic oligonucleotide
  source 1..36: mol_type = other DNA
aacaaggccaaaatacgcatataattctggttgaaa

SEQ ID NO: 3757 - DNA, 35 bp, synthetic construct
  misc_feature 1..35: note = Synthetic oligonucleotide
  source 1..35: mol_type = other DNA
agtgcgaactcttattactgctattaaaactgtcc

SEQ ID NO: 3758 - DNA, 36 bp, synthetic construct
  misc_feature 1..36: note = Synthetic oligonucleotide
  source 1..36: mol_type = other DNA
tcttgctacgtttgttcgcaccaaacttgtcctgca

SEQ ID NO: 3759 - DNA, 34 bp, synthetic construct
  misc_feature 1..34: note = Synthetic oligonucleotide
  source 1..34: mol_type = other DNA
gttctcgcgcgcacatcaattatatcacaaataa

SEQ ID NO: 3760 - DNA, 38 bp, synthetic construct
  misc_feature 1..38: note = Synthetic oligonucleotide
  source 1..38: mol_type = other DNA
atttacgttcgcttcatggacgcggtcataggacctga

SEQ ID NO: 3761 - DNA, 37 bp, synthetic construct
  misc_feature 1..37: note = Synthetic oligonucleotide
  source 1..37: mol_type = other DNA
tcgcaccggccctcaataccatttacacatccacgga

SEQ ID NO: 3762 - DNA, 36 bp, synthetic construct
  misc_feature 1..36: note = Synthetic oligonucleotide
  source 1..36: mol_type = other DNA
ctcgccacgacttaattctcaattcctcacaactga

SEQ ID NO: 3763 - DNA, 36 bp, synthetic construct
  misc_feature 1..36: note = Synthetic oligonucleotide
  source 1..36: mol_type = other DNA
aactgtacggcgcaattttactctcaagtaccaaaa

SEQ ID NO: 3764 - DNA, 36 bp, synthetic construct
  misc_feature 1..36: note = Synthetic oligonucleotide
  source 1..36: mol_type = other DNA
cactgtcaagttttccattccactatacatcaatca

SEQ ID NO: 3765 - DNA, 37 bp, synthetic construct
  misc_feature 1..37: note = Synthetic oligonucleotide
  source 1..37: mol_type = other DNA
ctttcatcataacccggggaatttaccggccgcctca

SEQ ID NO: 3766 - DNA, 38 bp, synthetic construct
  misc_feature 1..38: note = Synthetic oligonucleotide
  source 1..38: mol_type = other DNA
ggtatttgctagatcttcaattacctcgccgtatataa

SEQ ID NO: 3767 - DNA, 35 bp, synthetic construct
  misc_feature 1..35: note = Synthetic oligonucleotide
  source 1..35: mol_type = other DNA
tgcctgcattgctcgtggaggctcattgactttca

SEQ ID NO: 3768 - DNA, 38 bp, synthetic construct
  misc_feature 1..38: note = Synthetic oligonucleotide
  source 1..38: mol_type = other DNA
ctctgtccttgctttctctctcattccgatgactatga

SEQ ID NO: 3769 - DNA, 38 bp, synthetic construct
  misc_feature 1..38: note = Synthetic oligonucleotide
  source 1..38: mol_type = other DNA
gatctccacttcaggcgccattctatacccattaatga

SEQ ID NO: 3770 - DNA, 38 bp, synthetic construct
  misc_feature 1..38: note = Synthetic oligonucleotide
  source 1..38: mol_type = other DNA
tatcaattttattaataccctcattgtgctcctactga

SEQ ID NO: 3771 - DNA, 35 bp, synthetic construct
  misc_feature 1..35: note = Synthetic oligonucleotide
  source 1..35: mol_type = other DNA
gatgcgagaaccactatccatcccacacgccgatt

SEQ ID NO: 3772 - DNA, 36 bp, synthetic construct
  misc_feature 1..36: note = Synthetic oligonucleotide
  source 1..36: mol_type = other DNA
agcactctgtcaggtcgatcattatttcacaacaca

SEQ ID NO: 3773 - DNA, 36 bp, synthetic construct
  misc_feature 1..36: note = Synthetic oligonucleotide
  source 1..36: mol_type = other DNA
gagttcggccctcgttgatcctcgattacaaattaa

SEQ ID NO: 3774 - DNA, 38 bp, synthetic construct
  misc_feature 1..38: note = Synthetic oligonucleotide
  source 1..38: mol_type = other DNA
gggggtacgtccagcttatcatctcataccattattga

SEQ ID NO: 3775 - DNA, 38 bp, synthetic construct
  misc_feature 1..38: note = Synthetic oligonucleotide
  source 1..38: mol_type = other DNA
cgcacgtcacgagcacaccaacactacttcaccactga

SEQ ID NO: 3776 - DNA, 35 bp, synthetic construct
  misc_feature 1..35: note = Synthetic oligonucleotide
  source 1..35: mol_type = other DNA
acatgtcgtccacctatgttgttaccattatttat

SEQ ID NO: 3777 - DNA, 35 bp, synthetic construct
  misc_feature 1..35: note = Synthetic oligonucleotide
  source 1..35: mol_type = other DNA
attcaatcccctcctatggcttgccccccggttct

SEQ ID NO: 3778 - DNA, 36 bp, synthetic construct
  misc_feature 1..36: note = Synthetic oligonucleotide
  source 1..36: mol_type = other DNA
cggtattcgtacgtctgcgcgcaacccattataaca

SEQ ID NO: 3779 - DNA, 38 bp, synthetic construct
  misc_feature 1..38: note = Synthetic oligonucleotide
  source 1..38: mol_type = other DNA
tccatgcagccacgctcagttactactactagtgatga

SEQ ID NO: 3780 - DNA, 35 bp, synthetic construct
  misc_feature 1..35: note = Synthetic oligonucleotide
  source 1..35: mol_type = other DNA
atcacatttccatcgatctccaaggttctcaaact

SEQ ID NO: 3781 - DNA, 35 bp, synthetic construct
  misc_feature 1..35: note = Synthetic oligonucleotide
  source 1..35: mol_type = other DNA
gtgttcctcacactaatcgttctactttcttaact

SEQ ID NO: 3782 - DNA, 36 bp, synthetic construct
  misc_feature 1..36: note = Synthetic oligonucleotide
  source 1..36: mol_type = other DNA
tcacactccatagatctctcggtagacgcagtccga

SEQ ID NO: 3783 - DNA, 36 bp, synthetic construct
  misc_feature 1..36: note = Synthetic oligonucleotide
  source 1..36: mol_type = other DNA
ccattacaacactacctctatatggtcctatccgca

SEQ ID NO: 3784 - DNA, 36 bp, synthetic construct
  misc_feature 1..36: note = Synthetic oligonucleotide
  source 1..36: mol_type = other DNA
cgctatctctacgccaattaagtcgctcctggtaca

SEQ ID NO: 3785 - DNA, 36 bp, synthetic construct
  misc_feature 1..36: note = Synthetic oligonucleotide
  source 1..36: mol_type = other DNA
gcagataccaagtcattactttattatacataacca

SEQ ID NO: 3786 - DNA, 36 bp, synthetic construct
  misc_feature 1..36: note = Synthetic oligonucleotide
  source 1..36: mol_type = other DNA
attcgtactctataaattccaatggcgtacccacaa

SEQ ID NO: 3787 - DNA, 35 bp, synthetic construct
  misc_feature 1..35: note = Synthetic oligonucleotide
  source 1..35: mol_type = other DNA
tcagtacaccattaatcaccatatcacgcattatc

SEQ ID NO: 3788 - DNA, 38 bp, synthetic construct
  misc_feature 1..38: note = Synthetic oligonucleotide
  source 1..38: mol_type = other DNA
aaccgggtacccacaccacccgtaaccatcccaattta

SEQ ID NO: 3789 - DNA, 35 bp, synthetic construct
  misc_feature 1..35: note = Synthetic oligonucleotide
  source 1..35: mol_type = other DNA
aaacggacgcgcgaaactagttggaacattattcc

SEQ ID NO: 3790 - DNA, 35 bp, synthetic construct
  misc_feature 1..35: note = Synthetic oligonucleotide
  source 1..35: mol_type = other DNA
aacaacgaaataggaaatcctctgctgaaccaaat

SEQ ID NO: 3791 - DNA, 35 bp, synthetic construct
  misc_feature 1..35: note = Synthetic oligonucleotide
  source 1..35: mol_type = other DNA
catgccccccgagtttcgtagttattttcctaaac

SEQ ID NO: 3792 - DNA, 35 bp, synthetic construct
  misc_feature 1..35: note = Synthetic oligonucleotide
  source 1..35: mol_type = other DNA
acgcaattcagaacatattcgcaactctttcaaat

SEQ ID NO: 3793 - DNA, 35 bp, synthetic construct
  misc_feature 1..35: note = Synthetic oligonucleotide
  source 1..35: mol_type = other DNA
tttcgaattctccacctgatacccgccacattaaa

SEQ ID NO: 3794 - DNA, 36 bp, synthetic construct
  misc_feature 1..36: note = Synthetic oligonucleotide
  source 1..36: mol_type = other DNA
accctcctattaacccatcaaaagttcgctaccata

SEQ ID NO: 3795 - DNA, 37 bp, synthetic construct
  misc_feature 1..37: note = Synthetic oligonucleotide
  source 1..37: mol_type = other DNA
atactccacaacgaacatccaaactgtttacatcaga

SEQ ID NO: 3796 - DNA, 36 bp, synthetic construct
  misc_feature 1..36: note = Synthetic oligonucleotide
  source 1..36: mol_type = other DNA
gagtacctagccgcaccggtcttaattttcttaaaa

SEQ ID NO: 3797 - DNA, 35 bp, synthetic construct
  misc_feature 1..35: note = Synthetic oligonucleotide
  source 1..35: mol_type = other DNA
aagctgcacggatcttccatgtcccctctattaaa

SEQ ID NO: 3798 - DNA, 37 bp, synthetic construct
  misc_feature 1..37: note = Synthetic oligonucleotide
  source 1..37: mol_type = other DNA
agttctattatggctcctaactgttcttgttttcaga

SEQ ID NO: 3799 - DNA, 36 bp, synthetic construct
  misc_feature 1..36: note = Synthetic oligonucleotide
  source 1..36: mol_type = other DNA
acactcgcctagaagccaccacccatttctcataaa

SEQ ID NO: 3800 - DNA, 37 bp, synthetic construct
  misc_feature 1..37: note = Synthetic oligonucleotide
  source 1..37: mol_type = other DNA
cctccaccatccgaacattaactaattacccgccaga

SEQ ID NO: 3801 - DNA, 35 bp, synthetic construct
  misc_feature 1..35: note = Synthetic oligonucleotide
  source 1..35: mol_type = other DNA
tacttcctatagttacccacatctactaaccaaac

SEQ ID NO: 3802 - DNA, 36 bp, synthetic construct
  misc_feature 1..36: note = Synthetic oligonucleotide
  source 1..36: mol_type = other DNA
gagtactggcacgcgataccctaactgtacatcaca

SEQ ID NO: 3803 - DNA, 35 bp, synthetic construct
  misc_feature 1..35: note = Synthetic oligonucleotide
  source 1..35: mol_type = other DNA
agccagcaaggctagcatcacataattctcatatc

SEQ ID NO: 3804 - DNA, 37 bp, synthetic construct
  misc_feature 1..37: note = Synthetic oligonucleotide
  source 1..37: mol_type = other DNA
atgaatccgcactactaaaacaatttatccttataga

SEQ ID NO: 3805 - DNA, 37 bp, synthetic construct
  misc_feature 1..37: note = Synthetic oligonucleotide
  source 1..37: mol_type = other DNA
tctgtgctggctttagaaggttttctgttttttccta

SEQ ID NO: 3806 - DNA, 35 bp, synthetic construct
  misc_feature 1..35: note = Synthetic oligonucleotide
  source 1..35: mol_type = other DNA
acatagcactgctaggtttatctcattgtttttaa

SEQ ID NO: 3807 - DNA, 38 bp, synthetic construct
  misc_feature 1..38: note = Synthetic oligonucleotide
  source 1..38: mol_type = other DNA
ttctggcaattggcctctcactctctatggttttgtga

SEQ ID NO: 3808 - DNA, 35 bp, synthetic construct
  misc_feature 1..35: note = Synthetic oligonucleotide
  source 1..35: mol_type = other DNA
ttttgatttattctgcttgctgtttgggcttcttt

SEQ ID NO: 3809 - DNA, 38 bp, synthetic construct
  misc_feature 1..38: note = Synthetic oligonucleotide
  source 1..38: mol_type = other DNA
tatattcacaatcgattcttttcacttcctcattttga

SEQ ID NO: 3810 - DNA, 35 bp, synthetic construct
  misc_feature 1..35: note = Synthetic oligonucleotide
  source 1..35: mol_type = other DNA
tgtaggagttgtctctttttcatattttctgtctt

SEQ ID NO: 3811 - DNA, 35 bp, synthetic construct
  misc_feature 1..35: note = Synthetic oligonucleotide
  source 1..35: mol_type = other DNA
taggactggttaatcctccgaaattgtttttctat

SEQ ID NO: 3812 - DNA, 38 bp, synthetic construct
  misc_feature 1..38: note = Synthetic oligonucleotide
  source 1..38: mol_type = other DNA
ttctatcgggggagttcctactctggtttttttcttga

SEQ ID NO: 3813 - DNA, 35 bp, synthetic construct
  misc_feature 1..35: note = Synthetic oligonucleotide
  source 1..35: mol_type = other DNA
gcctgggtggttatttttttccatatcgaaattta

SEQ ID NO: 3814 - DNA, 36 bp, synthetic construct
  misc_feature 1..36: note = Synthetic oligonucleotide
  source 1..36: mol_type = other DNA
ttagttttctcactgtttcccgttgactattctcta

SEQ ID NO: 3815 - DNA, 38 bp, synthetic construct
  misc_feature 1..38: note = Synthetic oligonucleotide
  source 1..38: mol_type = other DNA
ctagtgaccactgcttcttttggttatcttaatcttga

SEQ ID NO: 3816 - DNA, 35 bp, synthetic construct
  misc_feature 1..35: note = Synthetic oligonucleotide
  source 1..35: mol_type = other DNA
gcctgggttgttatttttttccatatcgaaattta

SEQ ID NO: 3817 - DNA, 38 bp, synthetic construct
  misc_feature 1..38: note = Synthetic oligonucleotide
  source 1..38: mol_type = other DNA
tgtatgattttggtttttgttttggtttcacgtggtga

SEQ ID NO: 3818 - DNA, 38 bp, synthetic construct
  misc_feature 1..38: note = Synthetic oligonucleotide
  source 1..38: mol_type = other DNA
gcagtgttatttctcttggtttctttgatttcacttga

SEQ ID NO: 3819 - DNA, 38 bp, synthetic construct
  misc_feature 1..38: note = Synthetic oligonucleotide
  source 1..38: mol_type = other DNA
ttctatcgggggagttcctactcttgtttttttcttga

SEQ ID NO: 3820 - DNA, 38 bp, synthetic construct
  misc_feature 1..38: note = Synthetic oligonucleotide
  source 1..38: mol_type = other DNA
ggcctggttctcgtacatctgtattttggtttttctga

SEQ ID NO: 3821 - DNA, 35 bp, synthetic construct
  misc_feature 1..35: note = Synthetic oligonucleotide
  source 1..35: mol_type = other DNA
gcacccggggtttttatctgagttgtttttcattt

SEQ ID NO: 3822 - DNA, 36 bp, synthetic construct
  misc_feature 1..36: note = Synthetic oligonucleotide
  source 1..36: mol_type = other DNA
tttatccattgtccttggactctcctccgtttagaa

SEQ ID NO: 3823 - DNA, 38 bp, synthetic construct
  misc_feature 1..38: note = Synthetic oligonucleotide
  source 1..38: mol_type = other DNA
ctgcgctggccaatctcatgttttgtttttattaatga

SEQ ID NO: 3824 - DNA, 36 bp, synthetic construct
  misc_feature 1..36: note = Synthetic oligonucleotide
  source 1..36: mol_type = other DNA
tgcttctttaatctgttttctactattttgatataa

SEQ ID NO: 3825 - DNA, 38 bp, synthetic construct
  misc_feature 1..38: note = Synthetic oligonucleotide
  source 1..38: mol_type = other DNA
gatcccgaattgttttcctattaatcgttttcccatga

SEQ ID NO: 3826 - DNA, 38 bp, synthetic construct
  misc_feature 1..38: note = Synthetic oligonucleotide
  source 1..38: mol_type = other DNA
tcccttgggactctttggttattaacatttctctttga

SEQ ID NO: 3827 - DNA, 36 bp, synthetic construct
  misc_feature 1..36: note = Synthetic oligonucleotide
  source 1..36: mol_type = other DNA
tctaactgctggaccctcctgttttttattagtcta

SEQ ID NO: 3828 - DNA, 38 bp, synthetic construct
  misc_feature 1..38: note = Synthetic oligonucleotide
  source 1..38: mol_type = other DNA
gcagtacggaggtttaagttgtttctcctattttttga

SEQ ID NO: 3829 - DNA, 35 bp, synthetic construct
  misc_feature 1..35: note = Synthetic oligonucleotide
  source 1..35: mol_type = other DNA
atgaccgtttcttggaagtttccgattttttttgt

SEQ ID NO: 3830 - DNA, 36 bp, synthetic construct
  misc_feature 1..36: note = Synthetic oligonucleotide
  source 1..36: mol_type = other DNA
taatgcattgttcgcacctggtttttttaatggtta

SEQ ID NO: 3831 - DNA, 38 bp, synthetic construct
  misc_feature 1..38: note = Synthetic oligonucleotide
  source 1..38: mol_type = other DNA
gagcaataattcctgtttctatctctacaaccatttga

SEQ ID NO: 3832 - DNA, 36 bp, synthetic construct
  misc_feature 1..36: note = Synthetic oligonucleotide
  source 1..36: mol_type = other DNA
actgacttaatctaatttgttttccattctcatgaa

SEQ ID NO: 3833 - DNA, 38 bp, synthetic construct
  misc_feature 1..38: note = Synthetic oligonucleotide
  source 1..38: mol_type = other DNA
gtgcacgggcgttttttaatttaagtttcttgttttga

SEQ ID NO: 3834 - DNA, 35 bp, synthetic construct
  misc_feature 1..35: note = Synthetic oligonucleotide
  source 1..35: mol_type = other DNA
ttatactatccaaatctcgtgtctttcctcattat

SEQ ID NO: 3835 - DNA, 36 bp, synthetic construct
  misc_feature 1..36: note = Synthetic oligonucleotide
  source 1..36: mol_type = other DNA
gtcgtaatttgttctttatatctatttcttgttgta

SEQ ID NO: 3836 - DNA, 36 bp, synthetic construct
  misc_feature 1..36: note = Synthetic oligonucleotide
  source 1..36: mol_type = other DNA
ccttggagttgctggtaacctgttgttttttattga

SEQ ID NO: 3837 - DNA, 35 bp, synthetic construct
  misc_feature 1..35: note = Synthetic oligonucleotide
  source 1..35: mol_type = other DNA
acgtgcctgataattatatgtatgtttcttgtttt

SEQ ID NO: 3838 - DNA, 36 bp, synthetic construct
  misc_feature 1..36: note = Synthetic oligonucleotide
  source 1..36: mol_type = other DNA
atctttcacttagtctcggagttttttgtttcctta

SEQ ID NO: 3839 - DNA, 36 bp, synthetic construct
  misc_feature 1..36: note = Synthetic oligonucleotide
  source 1..36: mol_type = other DNA
attcgtttatttttatttcctgattggtttatttca

SEQ ID NO: 3840 - DNA, 35 bp, synthetic construct
  misc_feature 1..35: note = Synthetic oligonucleotide
  source 1..35: mol_type = other DNA
ttcactggtttttttctttctgacctatagattgc

SEQ ID NO: 3841 - DNA, 36 bp, synthetic construct
  misc_feature 1..36: note = Synthetic oligonucleotide
  source 1..36: mol_type = other DNA
ttgctaatttctgggtttgttacgtccttttatata

SEQ ID NO: 3842 - DNA, 36 bp, synthetic construct
  misc_feature 1..36: note = Synthetic oligonucleotide
  source 1..36: mol_type = other DNA
tacttttttgatttttgatcttggcccacgaaataa

SEQ ID NO: 3843 - DNA, 37 bp, synthetic construct
  misc_feature 1..37: note = Synthetic oligonucleotide
  source 1..37: mol_type = other DNA
tctctcttgtcaatagaatttttgtttgtatcttcga

SEQ ID NO: 3844 - DNA, 36 bp, synthetic construct
  misc_feature 1..36: note = Synthetic oligonucleotide
  source 1..36: mol_type = other DNA
tgtgctcactatgtctctccgttgtctgttttttta

SEQ ID NO: 3845 - DNA, 36 bp, synthetic construct
  misc_feature 1..36: note = Synthetic oligonucleotide
  source 1..36: mol_type = other DNA
aatcaagcagggttcaccattgtcgtttttttttta

SEQ ID NO: 3846 - DNA, 38 bp, synthetic construct
  misc_feature 1..38: note = Synthetic oligonucleotide
  source 1..38: mol_type = other DNA
gatgtactgttcgttttgttttgtccttttcatcatga

SEQ ID NO: 3847 - DNA, 36 bp, synthetic construct
  misc_feature 1..36: note = Synthetic oligonucleotide
  source 1..36: mol_type = other DNA
cgcatactgccgcatcgcatttgttttattgttgta

SEQ ID NO: 3848 - DNA, 35 bp, synthetic construct
  misc_feature 1..35: note = Synthetic oligonucleotide
  source 1..35: mol_type = other DNA
ttgtggttgttcatacctgctatcttttttcgttt

SEQ ID NO: 3849 - DNA, 38 bp, synthetic construct
  misc_feature 1..38: note = Synthetic oligonucleotide
  source 1..38: mol_type = other DNA
gagtgatgcggaataaatcgctttgttttgtttcctga

SEQ ID NO: 3850 - DNA, 35 bp, synthetic construct
  misc_feature 1..35: note = Synthetic oligonucleotide
  source 1..35: mol_type = other DNA
ttagtaggtaactttcactgtttttttatcgtttt

SEQ ID NO: 3851 - DNA, 37 bp, synthetic construct
  misc_feature 1..37: note = Synthetic oligonucleotide
  source 1..37: mol_type = other DNA
gggtctctttttctttaactcttttatctaaatttga

SEQ ID NO: 3852 - DNA, 38 bp, synthetic construct
  misc_feature 1..38: note = Synthetic oligonucleotide
  source 1..38: mol_type = other DNA
tgacgtttttttgactggtttttctgaagtggttttga

SEQ ID NO: 3853 - DNA, 35 bp, synthetic construct
  misc_feature 1..35: note = Synthetic oligonucleotide
  source 1..35: mol_type = other DNA
gacgccaccgttttttattttagttgatttagata

SEQ ID NO: 3854 - DNA, 38 bp, synthetic construct
  misc_feature 1..38: note = Synthetic oligonucleotide
  source 1..38: mol_type = other DNA
tcataaatcactctatctttgtttttcagtcttagtga

SEQ ID NO: 3855 - DNA, 35 bp, synthetic construct
  misc_feature 1..35: note = Synthetic oligonucleotide
  source 1..35: mol_type = other DNA
ttacggatgcttttttttgtcctgagattactttt

SEQ ID NO: 3856 - DNA, 35 bp, synthetic construct
  misc_feature 1..35: note = Synthetic oligonucleotide
  source 1..35: mol_type = other DNA
gactgtacgatggcttaattgttttgtattttgtt

SEQ ID NO: 3857 - DNA, 35 bp, synthetic construct
  misc_feature 1..35: note = Synthetic oligonucleotide
  source 1..35: mol_type = other DNA
ttattgtttctaccatgtttgttgcatatgttttt

SEQ ID NO: 3858 - DNA, 38 bp, synthetic construct
  misc_feature 1..38: note = Synthetic oligonucleotide
  source 1..38: mol_type = other DNA
tttttccgttcaactctactttcgatatattatggtga

SEQ ID NO: 3859 - DNA, 37 bp, synthetic construct
  misc_feature 1..37: note = Synthetic oligonucleotide
  source 1..37: mol_type = other DNA
tagtctttccgattgtttttgttatttatatgcctga

SEQ ID NO: 3860 - DNA, 36 bp, synthetic construct
  misc_feature 1..36: note = Synthetic oligonucleotide
  source 1..36: mol_type = other DNA
gcggggcgccctcgatttggttttatttttctcaca

SEQ ID NO: 3861 - DNA, 37 bp, synthetic construct
  misc_feature 1..37: note = Synthetic oligonucleotide
  source 1..37: mol_type = other DNA
tgttacttttttatcttgttctgccatctctaattga

SEQ ID NO: 3862 - DNA, 36 bp, synthetic construct
  misc_feature 1..36: note = Synthetic oligonucleotide
  source 1..36: mol_type = other DNA
tatctatcactaagtttttatatctaaggtccatta

SEQ ID NO: 3863 - DNA, 38 bp, synthetic construct
  misc_feature 1..38: note = Synthetic oligonucleotide
  source 1..38: mol_type = other DNA
ggctttgttcattttcttactctttgtttgtagtttga

SEQ ID NO: 3864 - DNA, 38 bp, synthetic construct
  misc_feature 1..38: note = Synthetic oligonucleotide
  source 1..38: mol_type = other DNA
gccggtttatttaccgagtttttcatcttttcttatga

SEQ ID NO: 3865 - DNA, 37 bp, synthetic construct
  misc_feature 1..37: note = Synthetic oligonucleotide
  source 1..37: mol_type = other DNA
agggtactagcattttcgattttgtgaaattttctga

SEQ ID NO: 3866 - DNA, 38 bp, synthetic construct
  misc_feature 1..38: note = Synthetic oligonucleotide
  source 1..38: mol_type = other DNA
atactgcagtagcacttgtcgtttttctccaatattga

SEQ ID NO: 3867 - DNA, 35 bp, synthetic construct
  misc_feature 1..35: note = Synthetic oligonucleotide
  source 1..35: mol_type = other DNA
ttcgttcctaagaatttgccatttgttttttggtc

SEQ ID NO: 3868 - DNA, 37 bp, synthetic construct
  misc_feature 1..37: note = Synthetic oligonucleotide
  source 1..37: mol_type = other DNA
tcactctatccagcatgcgaggtgttattctatttga

SEQ ID NO: 3869 - DNA, 35 bp, synthetic construct
  misc_feature 1..35: note = Synthetic oligonucleotide
  source 1..35: mol_type = other DNA
agtcgatagaataattttttggttttctcactcat

SEQ ID NO: 3870 - DNA, 35 bp, synthetic construct
  misc_feature 1..35: note = Synthetic oligonucleotide
  source 1..35: mol_type = other DNA
tactgtccttttcaattcgtgtcttggttttatta

SEQ ID NO: 3871 - DNA, 38 bp, synthetic construct
  misc_feature 1..38: note = Synthetic oligonucleotide
  source 1..38: mol_type = other DNA
taaacgtggtactgcgcacggttatttctttctcttga

SEQ ID NO: 3872 - DNA, 38 bp, synthetic construct
  misc_feature 1..38: note = Synthetic oligonucleotide
  source 1..38: mol_type = other DNA
tggggtacttgcctactttttacctggttgttatttga

SEQ ID NO: 3873 - DNA, 38 bp, synthetic construct
  misc_feature 1..38: note = Synthetic oligonucleotide
  source 1..38: mol_type = other DNA
ttggggttaacgttctgatctcgttttcttattattga

SEQ ID NO: 3874 - DNA, 36 bp, synthetic construct
  misc_feature 1..36: note = Synthetic oligonucleotide
  source 1..36: mol_type = other DNA
ggaatgcagcactcgaggttttctttgtttttccca

SEQ ID NO: 3875 - DNA, 38 bp, synthetic construct
  misc_feature 1..38: note = Synthetic oligonucleotide
  source 1..38: mol_type = other DNA
gcgcccaaatccgttgctttgttgttttgtacttttga

SEQ ID NO: 3876 - DNA, 38 bp, synthetic construct
  misc_feature 1..38: note = Synthetic oligonucleotide
  source 1..38: mol_type = other DNA
agtagcctttctctcgatctttgtttgttttttgatga

SEQ ID NO: 3877 - DNA, 38 bp, synthetic construct
  misc_feature 1..38: note = Synthetic oligonucleotide
  source 1..38: mol_type = other DNA
actttcggttgaccatcatatatctctttcttacttga

SEQ ID NO: 3878 - DNA, 35 bp, synthetic construct
  misc_feature 1..35: note = Synthetic oligonucleotide
  source 1..35: mol_type = other DNA
gtcgtaccaatatcggatatcctggtttttctgtc

SEQ ID NO: 3879 - DNA, 38 bp, synthetic construct
  misc_feature 1..38: note = Synthetic oligonucleotide
  source 1..38: mol_type = other DNA
ttactgaacctctccggccctctattttttgaagttga

SEQ ID NO: 3880 - DNA, 35 bp, synthetic construct
  misc_feature 1..35: note = Synthetic oligonucleotide
  source 1..35: mol_type = other DNA
ttttccgtttaattcgatcactttcattgtctcca

SEQ ID NO: 3881 - DNA, 35 bp, synthetic construct
  misc_feature 1..35: note = Synthetic oligonucleotide
  source 1..35: mol_type = other DNA
gcgttgacatgggattctttgtctcttagtctttt

SEQ ID NO: 3882 - DNA, 37 bp, synthetic construct
  misc_feature 1..37: note = Synthetic oligonucleotide
  source 1..37: mol_type = other DNA
agttctattatggctcctaactgttcttgttttccga

SEQ ID NO: 3883 - DNA, 38 bp, synthetic construct
  misc_feature 1..38: note = Synthetic oligonucleotide
  source 1..38: mol_type = other DNA
gctgcactctacacttatggttgtctatcttttactga

SEQ ID NO: 3884 - DNA, 38 bp, synthetic construct
  misc_feature 1..38: note = Synthetic oligonucleotide
  source 1..38: mol_type = other DNA
tgaacgtagcagttttgacatttagtatatctttttga

SEQ ID NO: 3885 - DNA, 35 bp, synthetic construct
  misc_feature 1..35: note = Synthetic oligonucleotide
  source 1..35: mol_type = other DNA
gcggtccgtatgggatttttatttcgttcttgtta

SEQ ID NO: 3886 - DNA, 35 bp, synthetic construct
  misc_feature 1..35: note = Synthetic oligonucleotide
  source 1..35: mol_type = other DNA
ttttaggggtcctgtacattctatccttttatcat

SEQ ID NO: 3887 - DNA, 37 bp, synthetic construct
  misc_feature 1..37: note = Synthetic oligonucleotide
  source 1..37: mol_type = other DNA
ttgtccttccctgttagtctatcatctttcctctgga

SEQ ID NO: 3888 - DNA, 35 bp, synthetic construct
  misc_feature 1..35: note = Synthetic oligonucleotide
  source 1..35: mol_type = other DNA
acgacgccccttttgttgtttttcttggtatcttc

SEQ ID NO: 3889 - DNA, 38 bp, synthetic construct
  misc_feature 1..38: note = Synthetic oligonucleotide
  source 1..38: mol_type = other DNA
gagggccccctatcatattgtttttttatcctccatga

SEQ ID NO: 3890 - DNA, 36 bp, synthetic construct
  misc_feature 1..36: note = Synthetic oligonucleotide
  source 1..36: mol_type = other DNA
tgctgccgtaacactgtttatttctattcttgatta

SEQ ID NO: 3891 - DNA, 37 bp, synthetic construct
  misc_feature 1..37: note = Synthetic oligonucleotide
  source 1..37: mol_type = other DNA
tcgactctggtttgtttttttggtttattacttcgga

SEQ ID NO: 3892 - DNA, 35 bp, synthetic construct
  misc_feature 1..35: note = Synthetic oligonucleotide
  source 1..35: mol_type = other DNA
tgttcaaccggtcccattgttttttgtcgtaatct

SEQ ID NO: 3893 - DNA, 35 bp, synthetic construct
  misc_feature 1..35: note = Synthetic oligonucleotide
  source 1..35: mol_type = other DNA
cacgccttccttttgggttgttgatctcgtttttt

SEQ ID NO: 3894 - DNA, 38 bp, synthetic construct
  misc_feature 1..38: note = Synthetic oligonucleotide
  source 1..38: mol_type = other DNA
aaacgcatttggctcaattgatcttattatttttctga

SEQ ID NO: 3895 - DNA, 36 bp, synthetic construct
  misc_feature 1..36: note = Synthetic oligonucleotide
  source 1..36: mol_type = other DNA
tttaccttgccctggttacgaaatatttgtctctca

SEQ ID NO: 3896 - DNA, 38 bp, synthetic construct
  misc_feature 1..38: note = Synthetic oligonucleotide
  source 1..38: mol_type = other DNA
tataccatcgcttctcatactggggtttatttttttga

SEQ ID NO: 3897 - DNA, 37 bp, synthetic construct
  misc_feature 1..37: note = Synthetic oligonucleotide
  source 1..37: mol_type = other DNA
taaatcgttctcgtaacaccttctatcttttttatga

SEQ ID NO: 3898 - DNA, 35 bp, synthetic construct
  misc_feature 1..35: note = Synthetic oligonucleotide
  source 1..35: mol_type = other DNA
atggatttggccttcactctatgttctcgttttct

SEQ ID NO: 3899 - DNA, 38 bp, synthetic construct
  misc_feature 1..38: note = Synthetic oligonucleotide
  source 1..38: mol_type = other DNA
catcgcatctcgaacgggccttttgttttattatttga

SEQ ID NO: 3900 - DNA, 35 bp, synthetic construct
  misc_feature 1..35: note = Synthetic oligonucleotide
  source 1..35: mol_type = other DNA
gcctttacacatttctgttttgataaagtaattct

SEQ ID NO: 3901 - DNA, 38 bp, synthetic construct
  misc_feature 1..38: note = Synthetic oligonucleotide
  source 1..38: mol_type = other DNA
gtgcgctatctaatgtcaccgtttttttcctcaattga

SEQ ID NO: 3902 - DNA, 37 bp, synthetic construct
  misc_feature 1..37: note = Synthetic oligonucleotide
  source 1..37: mol_type = other DNA
tgtcacgtacctcgtgtttcttttctgttaaacttga

SEQ ID NO: 3903 - DNA, 38 bp, synthetic construct
  misc_feature 1..38: note = Synthetic oligonucleotide
  source 1..38: mol_type = other DNA
aatggaacaaactactttcattttctttctctcattga

SEQ ID NO: 3904 - DNA, 38 bp, synthetic construct
  misc_feature 1..38: note = Synthetic oligonucleotide
  source 1..38: mol_type = other DNA
tttcccaaatctagcttttttcaataatccatatctga

SEQ ID NO: 3905 - DNA, 38 bp, synthetic construct
  misc_feature 1..38: note = Synthetic oligonucleotide
  source 1..38: mol_type = other DNA
ttccatctcaccaatgttggtgactgttgccattttga

SEQ ID NO: 3906 - DNA, 37 bp, synthetic construct
  misc_feature 1..37: note = Synthetic oligonucleotide
  source 1..37: mol_type = other DNA
actcgtgtttttttcgttttgtgcccttcgattctta

SEQ ID NO: 3907 - DNA, 35 bp, synthetic construct
  misc_feature 1..35: note = Synthetic oligonucleotide
  source 1..35: mol_type = other DNA
agtgcccggattagctggctacagtttttttctct

SEQ ID NO: 3908 - DNA, 35 bp, synthetic construct
  misc_feature 1..35: note = Synthetic oligonucleotide
  source 1..35: mol_type = other DNA
aaactccttttttgtatgtcgccatttctttctta

SEQ ID NO: 3909 - DNA, 36 bp, synthetic construct
  misc_feature 1..36: note = Synthetic oligonucleotide
  source 1..36: mol_type = other DNA
tcttggcatgtcctcgttttttgatatctgctttta

SEQ ID NO: 3910 - DNA, 36 bp, synthetic construct
  misc_feature 1..36: note = Synthetic oligonucleotide
  source 1..36: mol_type = other DNA
tgtcgtagtagtgcgcatttgtttaactctctatca

SEQ ID NO: 3911 - DNA, 38 bp, synthetic construct
  misc_feature 1..38: note = Synthetic oligonucleotide
  source 1..38: mol_type = other DNA
tccactgtttacggttttaaattgtttccttgccctga

SEQ ID NO: 3912 - DNA, 38 bp, synthetic construct
  misc_feature 1..38: note = Synthetic oligonucleotide
  source 1..38: mol_type = other DNA
agtccatgcgagctgcatgtactctcggttttttatga

SEQ ID NO: 3913 - DNA, 37 bp, synthetic construct
  misc_feature 1..37: note = Synthetic oligonucleotide
  source 1..37: mol_type = other DNA
gcgtgtttagttaattcgttttttaccaatggggtga

SEQ ID NO: 3914 - DNA, 38 bp, synthetic construct
  misc_feature 1..38: note = Synthetic oligonucleotide
  source 1..38: mol_type = other DNA
agtttcccttccgtttctttctcagtttaactctttga

SEQ ID NO: 3915 - DNA, 38 bp, synthetic construct
  misc_feature 1..38: note = Synthetic oligonucleotide
  source 1..38: mol_type = other DNA
ggtgctccgggcttgtaactttatagttttttccttga

SEQ ID NO: 3916 - DNA, 35 bp, synthetic construct
  misc_feature 1..35: note = Synthetic oligonucleotide
  source 1..35: mol_type = other DNA
gactctttgatctccttgaacgtttttgttatttc

SEQ ID NO: 3917 - DNA, 38 bp, synthetic construct
  misc_feature 1..38: note = Synthetic oligonucleotide
  source 1..38: mol_type = other DNA
tcgtttccaatgatttctcgatttacactccatcttga

SEQ ID NO: 3918 - DNA, 38 bp, synthetic construct
  misc_feature 1..38: note = Synthetic oligonucleotide
  source 1..38: mol_type = other DNA
tttctgtcaacactctcgaacatatatttactccttga

SEQ ID NO: 3919 - DNA, 37 bp, synthetic construct
  misc_feature 1..37: note = Synthetic oligonucleotide
  source 1..37: mol_type = other DNA
acgcggagcggttgtttttttttttgtaatccacaga

SEQ ID NO: 3920 - DNA, 36 bp, synthetic construct
  misc_feature 1..36: note = Synthetic oligonucleotide
  source 1..36: mol_type = other DNA
ttgttaacttttcatctcatctttttcgttacgtga

SEQ ID NO: 3921 - DNA, 38 bp, synthetic construct
  misc_feature 1..38: note = Synthetic oligonucleotide
  source 1..38: mol_type = other DNA
acgttggtgcaaacgttttttgatttctagtattttga

SEQ ID NO: 3922 - DNA, 38 bp, synthetic construct
  misc_feature 1..38: note = Synthetic oligonucleotide
  source 1..38: mol_type = other DNA
tatgccctctaattctgggcttttttttctgttgttga

SEQ ID NO: 3923 - DNA, 38 bp, synthetic construct
  misc_feature 1..38: note = Synthetic oligonucleotide
  source 1..38: mol_type = other DNA
gtttcatcttgttttattagatcttagattttttgtga

SEQ ID NO: 3924 - DNA, 38 bp, synthetic construct
  misc_feature 1..38: note = Synthetic oligonucleotide
  source 1..38: mol_type = other DNA
gcaatgcgatttgtttcgtgtttatcctatctagctga

SEQ ID NO: 3925 - DNA, 38 bp, synthetic construct
  misc_feature 1..38: note = Synthetic oligonucleotide
  source 1..38: mol_type = other DNA
tcgtgcttttctggtagttgaccacactgtttttttga

SEQ ID NO: 3926 - DNA, 38 bp, synthetic construct
  misc_feature 1..38: note = Synthetic oligonucleotide
  source 1..38: mol_type = other DNA
ttccatacgtatatttttttgaaattcgacttttttga

SEQ ID NO: 3927 - DNA, 38 bp, synthetic construct
  misc_feature 1..38: note = Synthetic oligonucleotide
  source 1..38: mol_type = other DNA
acgtttttgacctctagttctgtagcattttgttttga

SEQ ID NO: 3928 - DNA, 38 bp, synthetic construct
  misc_feature 1..38: note = Synthetic oligonucleotide
  source 1..38: mol_type = other DNA
actgaactttttttgtttacgaatccatctattgttga

SEQ ID NO: 3929 - DNA, 38 bp, synthetic construct
  misc_feature 1..38: note = Synthetic oligonucleotide
  source 1..38: mol_type = other DNA
gccgcataggggcaaaattgtttttctctcttacttga

SEQ ID NO: 3930 - DNA, 38 bp, synthetic construct
  misc_feature 1..38: note = Synthetic oligonucleotide
  source 1..38: mol_type = other DNA
accctgggggtttgtaaggctcttttttcgtaatttga

SEQ ID NO: 3931 - DNA, 35 bp, synthetic construct
  misc_feature 1..35: note = Synthetic oligonucleotide
  source 1..35: mol_type = other DNA
agttacataccgtttttcgttacttgaattcaaat

SEQ ID NO: 3932 - DNA, 36 bp, synthetic construct
  misc_feature 1..36: note = Synthetic oligonucleotide
  source 1..36: mol_type = other DNA
acgatcaccacaataatgtctttttttcgttttcta

SEQ ID NO: 3933 - DNA, 36 bp, synthetic construct
  misc_feature 1..36: note = Synthetic oligonucleotide
  source 1..36: mol_type = other DNA
gggactgacatccataatcgggttttttttctagaa

SEQ ID NO: 3934 - DNA, 38 bp, synthetic construct
  misc_feature 1..38: note = Synthetic oligonucleotide
  source 1..38: mol_type = other DNA
atcgggtgcgcccccgaatttttccatgtttttgttga

SEQ ID NO: 3935 - DNA, 37 bp, synthetic construct
  misc_feature 1..37: note = Synthetic oligonucleotide
  source 1..37: mol_type = other DNA
ttttgttacccattttggtccctatcctcactcatga

SEQ ID NO: 3936 - DNA, 36 bp, synthetic construct
  misc_feature 1..36: note = Synthetic oligonucleotide
  source 1..36: mol_type = other DNA
agttggacccgtacgattccctaactttcaacctaa

SEQ ID NO: 3937 - DNA, 36 bp, synthetic construct
  misc_feature 1..36: note = Synthetic oligonucleotide
  source 1..36: mol_type = other DNA
tttctggtctaattatttaaccattctcttgcttta

SEQ ID NO: 3938 - DNA, 38 bp, synthetic construct
  misc_feature 1..38: note = Synthetic oligonucleotide
  source 1..38: mol_type = other DNA
attggcgcctatactgctttgtattgttttcgatttga

SEQ ID NO: 3939 - DNA, 38 bp, synthetic construct
  misc_feature 1..38: note = Synthetic oligonucleotide
  source 1..38: mol_type = other DNA
tcctacaagcaaacggtgaagttgaattttatttttga

SEQ ID NO: 3940 - DNA, 38 bp, synthetic construct
  misc_feature 1..38: note = Synthetic oligonucleotide
  source 1..38: mol_type = other DNA
actgctgactgttttatttgacgataataattttttga

SEQ ID NO: 3941 - DNA, 35 bp, synthetic construct
  misc_feature 1..35: note = Synthetic oligonucleotide
  source 1..35: mol_type = other DNA
tttggtcgtatattctatttttggatgtgaattac

SEQ ID NO: 3942 - DNA, 38 bp, synthetic construct
  misc_feature 1..38: note = Synthetic oligonucleotide
  source 1..38: mol_type = other DNA
tacggtacatggtggagtctcttttgataattttttga

SEQ ID NO: 3943 - DNA, 38 bp, synthetic construct
  misc_feature 1..38: note = Synthetic oligonucleotide
  source 1..38: mol_type = other DNA
ttttgcaatggtgattaatgcggttcgcctgtttttga

SEQ ID NO: 3944 - DNA, 35 bp, synthetic construct
  misc_feature 1..35: note = Synthetic oligonucleotide
  source 1..35: mol_type = other DNA
aggttgcagtccgggatctttattgttaatattta

SEQ ID NO: 3945 - DNA, 36 bp, synthetic construct
  misc_feature 1..36: note = Synthetic oligonucleotide
  source 1..36: mol_type = other DNA
gtttaggctgtcaatggccttttgtttttattttaa

SEQ ID NO: 3946 - DNA, 38 bp, synthetic construct
  misc_feature 1..38: note = Synthetic oligonucleotide
  source 1..38: mol_type = other DNA
aggacttattacattctctgtgttccttatctttatga

SEQ ID NO: 3947 - DNA, 35 bp, synthetic construct
  misc_feature 1..35: note = Synthetic oligonucleotide
  source 1..35: mol_type = other DNA
gctctttcctgtcttgtttatttcgttggttttcc

SEQ ID NO: 3948 - DNA, 35 bp, synthetic construct
  misc_feature 1..35: note = Synthetic oligonucleotide
  source 1..35: mol_type = other DNA
gggttacgtacccgactttttttctggttttctct

SEQ ID NO: 3949 - DNA, 36 bp, synthetic construct
  misc_feature 1..36: note = Synthetic oligonucleotide
  source 1..36: mol_type = other DNA
tcgcaagctaatagctttattttttctgtctttcta

SEQ ID NO: 3950 - DNA, 38 bp, synthetic construct
  misc_feature 1..38: note = Synthetic oligonucleotide
  source 1..38: mol_type = other DNA
ttactatgcatcgtttgaatccgttgtttctccactga

SEQ ID NO: 3951 - DNA, 38 bp, synthetic construct
  misc_feature 1..38: note = Synthetic oligonucleotide
  source 1..38: mol_type = other DNA
tggagtttctgctgctcgacttggtatcctgtttgtga

SEQ ID NO: 3952 - DNA, 38 bp, synthetic construct
  misc_feature 1..38: note = Synthetic oligonucleotide
  source 1..38: mol_type = other DNA
gagtaccgtgtcaacgtttttttttgtattatcaatga

SEQ ID NO: 3953 - DNA, 38 bp, synthetic construct
  misc_feature 1..38: note = Synthetic oligonucleotide
  source 1..38: mol_type = other DNA
tctattaacccgtttacgtgctcacctcgtttttttga

SEQ ID NO: 3954 - DNA, 37 bp, synthetic construct
  misc_feature 1..37: note = Synthetic oligonucleotide
  source 1..37: mol_type = other DNA
gcatgagctcatttgttttatcttgtcgttttttgga

SEQ ID NO: 3955 - DNA, 38 bp, synthetic construct
  misc_feature 1..38: note = Synthetic oligonucleotide
  source 1..38: mol_type = other DNA
ttatctctatactatgttgtttctctatttaccactga

SEQ ID NO: 3956 - DNA, 37 bp, synthetic construct
  misc_feature 1..37: note = Synthetic oligonucleotide
  source 1..37: mol_type = other DNA
tagctcacgacgatttattttctcatttcttatttga

SEQ ID NO: 3957 - DNA, 35 bp, synthetic construct
  misc_feature 1..35: note = Synthetic oligonucleotide
  source 1..35: mol_type = other DNA
ttgcaaggcatccgccttgagttttttttcagttt

SEQ ID NO: 3958 - DNA, 36 bp, synthetic construct
  misc_feature 1..36: note = Synthetic oligonucleotide
  source 1..36: mol_type = other DNA
gcgttgtttcgttatggggtttcttctcacaatgga

SEQ ID NO: 3959 - DNA, 37 bp, synthetic construct
  misc_feature 1..37: note = Synthetic oligonucleotide
  source 1..37: mol_type = other DNA
gcaaatctccttgtttatccatctattcctcttagga

SEQ ID NO: 3960 - DNA, 37 bp, synthetic construct
  misc_feature 1..37: note = Synthetic oligonucleotide
  source 1..37: mol_type = other DNA
gccgtgcttctctttctttttcggttaaatttcttga

SEQ ID NO: 3961 - DNA, 38 bp, synthetic construct
  misc_feature 1..38: note = Synthetic oligonucleotide
  source 1..38: mol_type = other DNA
gtaggcctttgatttctttccttccgtttcttttgtga

SEQ ID NO: 3962 - DNA, 37 bp, synthetic construct
  misc_feature 1..37: note = Synthetic oligonucleotide
  source 1..37: mol_type = other DNA
atctcggtaatctcatcatgggggttgtttattttga

SEQ ID NO: 3963 - DNA, 37 bp, synthetic construct
  misc_feature 1..37: note = Synthetic oligonucleotide
  source 1..37: mol_type = other DNA
gcaggccgttcctcatatttgttgaattggttgttga

SEQ ID NO: 3964 - DNA, 38 bp, synthetic construct
  misc_feature 1..38: note = Synthetic oligonucleotide
  source 1..38: mol_type = other DNA
accgaacttttttcggattcctcggggtttttttttga

SEQ ID NO: 3965 - DNA, 36 bp, synthetic construct
  misc_feature 1..36: note = Synthetic oligonucleotide
  source 1..36: mol_type = other DNA
tggagtactgggcttgtccgtaatttttatgtaaca

SEQ ID NO: 3966 - DNA, 35 bp, synthetic construct
  misc_feature 1..35: note = Synthetic oligonucleotide
  source 1..35: mol_type = other DNA
tccatgtacgtcgatattgacatctttatttttta

SEQ ID NO: 3967 - DNA, 38 bp, synthetic construct
  misc_feature 1..38: note = Synthetic oligonucleotide
  source 1..38: mol_type = other DNA
atgttaggccacgattgttttattgttgatttttttga

SEQ ID NO: 3968 - DNA, 38 bp, synthetic construct
  misc_feature 1..38: note = Synthetic oligonucleotide
  source 1..38: mol_type = other DNA
gcggctcgcattgctttttatttcgtagactatcctga

SEQ ID NO: 3969 - DNA, 38 bp, synthetic construct
  misc_feature 1..38: note = Synthetic oligonucleotide
  source 1..38: mol_type = other DNA
tctacctggatggcgataattttttttgatctttttga

SEQ ID NO: 3970 - DNA, 35 bp, synthetic construct
  misc_feature 1..35: note = Synthetic oligonucleotide
  source 1..35: mol_type = other DNA
gagtgcccattagtaatttttcttccactttattt

SEQ ID NO: 3971 - DNA, 37 bp, synthetic construct
  misc_feature 1..37: note = Synthetic oligonucleotide
  source 1..37: mol_type = other DNA
gagtttccctttttattagtgccttttagttgtttga

SEQ ID NO: 3972 - DNA, 38 bp, synthetic construct
  misc_feature 1..38: note = Synthetic oligonucleotide
  source 1..38: mol_type = other DNA
ccataacacttggaggttctttgtttgttttgttttga

SEQ ID NO: 3973 - DNA, 38 bp, synthetic construct
  misc_feature 1..38: note = Synthetic oligonucleotide
  source 1..38: mol_type = other DNA
ttatttcctctcttaacgttttttactaacctatatga

SEQ ID NO: 3974 - DNA, 37 bp, synthetic construct
  misc_feature 1..37: note = Synthetic oligonucleotide
  source 1..37: mol_type = other DNA
ccgtccgctcctttaatccgttttgtttttctgctga

SEQ ID NO: 3975 - DNA, 35 bp, synthetic construct
  misc_feature 1..35: note = Synthetic oligonucleotide
  source 1..35: mol_type = other DNA
taattggcttttttacttatatttcctcatttgtt

SEQ ID NO: 3976 - DNA, 35 bp, synthetic construct
  misc_feature 1..35: note = Synthetic oligonucleotide
  source 1..35: mol_type = other DNA
tactacaggcctctttcgattttccgggtgttttt

SEQ ID NO: 3977 - DNA, 36 bp, synthetic construct
  misc_feature 1..36: note = Synthetic oligonucleotide
  source 1..36: mol_type = other DNA
gttctgtggttcgttttcttaatgttagtactctca

SEQ ID NO: 3978 - DNA, 37 bp, synthetic construct
  misc_feature 1..37: note = Synthetic oligonucleotide
  source 1..37: mol_type = other DNA
ggctgttttttcttgtatttcggatttaccaatatga

SEQ ID NO: 3979 - DNA, 35 bp, synthetic construct
  misc_feature 1..35: note = Synthetic oligonucleotide
  source 1..35: mol_type = other DNA
gggggactatctactaggctttcgttttttcctct

SEQ ID NO: 3980 - DNA, 35 bp, synthetic construct
  misc_feature 1..35: note = Synthetic oligonucleotide
  source 1..35: mol_type = other DNA
agcaattatgtgcgtttgtttttaatttatgttca

SEQ ID NO: 3981 - DNA, 37 bp, synthetic construct
  misc_feature 1..37: note = Synthetic oligonucleotide
  source 1..37: mol_type = other DNA
ttccacacggtgttgaacatttgttttattgatttga

SEQ ID NO: 3982 - DNA, 36 bp, synthetic construct
  misc_feature 1..36: note = Synthetic oligonucleotide
  source 1..36: mol_type = other DNA
ggtgtcgcttatttttatctttgaattggtcataaa

SEQ ID NO: 3983 - DNA, 36 bp, synthetic construct
  misc_feature 1..36: note = Synthetic oligonucleotide
  source 1..36: mol_type = other DNA
aacttttattgatatacgcatttttttcctgggata

SEQ ID NO: 3984 - DNA, 37 bp, synthetic construct
  misc_feature 1..37: note = Synthetic oligonucleotide
  source 1..37: mol_type = other DNA
catggtcgtttttctgtcctctaaacttactatccga

SEQ ID NO: 3985 - DNA, 38 bp, synthetic construct
  misc_feature 1..38: note = Synthetic oligonucleotide
  source 1..38: mol_type = other DNA
tagtctatggcttggctttccatggtttcctttcttga

SEQ ID NO: 3986 - DNA, 38 bp, synthetic construct
  misc_feature 1..38: note = Synthetic oligonucleotide
  source 1..38: mol_type = other DNA
agcactttcgtcatagtggttattgttgtaaattgtga

SEQ ID NO: 3987 - DNA, 36 bp, synthetic construct
  misc_feature 1..36: note = Synthetic oligonucleotide
  source 1..36: mol_type = other DNA
ttaagcgtacgaccgagtttttatatcatatcttga

SEQ ID NO: 3988 - DNA, 36 bp, synthetic construct
  misc_feature 1..36: note = Synthetic oligonucleotide
  source 1..36: mol_type = other DNA
gctctctctggtataggtttttttttgttatccaca

SEQ ID NO: 3989 - DNA, 36 bp, synthetic construct
  misc_feature 1..36: note = Synthetic oligonucleotide
  source 1..36: mol_type = other DNA
tgcctaggtatatttcgaattttcataggattttca

SEQ ID NO: 3990 - DNA, 37 bp, synthetic construct
  misc_feature 1..37: note = Synthetic oligonucleotide
  source 1..37: mol_type = other DNA
ttcttttttatgatgatccgatcctattttctttcga

SEQ ID NO: 3991 - DNA, 36 bp, synthetic construct
  misc_feature 1..36: note = Synthetic oligonucleotide
  source 1..36: mol_type = other DNA
ttgttttccttgttatgtttaaactgtcaaaatcca

SEQ ID NO: 3992 - DNA, 37 bp, synthetic construct
  misc_feature 1..37: note = Synthetic oligonucleotide
  source 1..37: mol_type = other DNA
tactgcagatattttaagtttctgttaatctttgtga

SEQ ID NO: 3993 - DNA, 35 bp, synthetic construct
  misc_feature 1..35: note = Synthetic oligonucleotide
  source 1..35: mol_type = other DNA
ttctctcaaaatagtttttctttccgcaggatgta

SEQ ID NO: 3994 - DNA, 38 bp, synthetic construct
  misc_feature 1..38: note = Synthetic oligonucleotide
  source 1..38: mol_type = other DNA
ttttagcgtaactggatttttttcacgacgttttctga

SEQ ID NO: 3995 - DNA, 38 bp, synthetic construct
  misc_feature 1..38: note = Synthetic oligonucleotide
  source 1..38: mol_type = other DNA
catgcatggctttctttccatgttctttctatccatga

SEQ ID NO: 3996 - DNA, 36 bp, synthetic construct
  misc_feature 1..36: note = Synthetic oligonucleotide
  source 1..36: mol_type = other DNA
acatgcgaccgttttcttgactttcttcgttattga

SEQ ID NO: 3997 - DNA, 38 bp, synthetic construct
  misc_feature 1..38: note = Synthetic oligonucleotide
  source 1..38: mol_type = other DNA
agctcctgttttccatttcaaatcacgttaatctatga

SEQ ID NO: 3998 - DNA, 38 bp, synthetic construct
  misc_feature 1..38: note = Synthetic oligonucleotide
  source 1..38: mol_type = other DNA
acggcgcctctcctgattttccatcttttctttcctga

SEQ ID NO: 3999 - DNA, 35 bp, synthetic construct
  misc_feature 1..35: note = Synthetic oligonucleotide
  source 1..35: mol_type = other DNA
tcgatatctcttgtttttgttaaattcgtcttcaa

SEQ ID NO: 4000 - DNA, 38 bp, synthetic construct
  misc_feature 1..38: note = Synthetic oligonucleotide
  source 1..38: mol_type = other DNA
ctctgtcccaaatccgtatccattttttcttactctga

SEQ ID NO: 4001 - DNA, 35 bp, synthetic construct
  misc_feature 1..35: note = Synthetic oligonucleotide
  source 1..35: mol_type = other DNA
gtgcttcgctctctgagtttttcatctgtcaattt

SEQ ID NO: 4002 - DNA, 38 bp, synthetic construct
  misc_feature 1..38: note = Synthetic oligonucleotide
  source 1..38: mol_type = other DNA
aagcaacgctgacctttcagactttttttatttgttga

SEQ ID NO: 4003 - DNA, 38 bp, synthetic construct
  misc_feature 1..38: note = Synthetic oligonucleotide
  source 1..38: mol_type = other DNA
actctttctgggggtttttcttcttatagatttcttga

SEQ ID NO: 4004 - DNA, 36 bp, synthetic construct
  misc_feature 1..36: note = Synthetic oligonucleotide
  source 1..36: mol_type = other DNA
ttatggtacactctctattgatgtttttctatctta

SEQ ID NO: 4005 - DNA, 36 bp, synthetic construct
  misc_feature 1..36: note = Synthetic oligonucleotide
  source 1..36: mol_type = other DNA
ccctcaattaattatgcttgtattttgtttctatct

SEQ ID NO: 4006 - DNA, 38 bp, synthetic construct
  misc_feature 1..38: note = Synthetic oligonucleotide
  source 1..38: mol_type = other DNA
ttctcgctgtttgttttcccattatgttacgctattga

SEQ ID NO: 4007 - DNA, 37 bp, synthetic construct
  misc_feature 1..37: note = Synthetic oligonucleotide
  source 1..37: mol_type = other DNA
gaggttttgcgattggattttttggttgttatcttga

SEQ ID NO: 4008 - DNA, 36 bp, synthetic construct
  misc_feature 1..36: note = Synthetic oligonucleotide
  source 1..36: mol_type = other DNA
aacccgtagtagcacaccctgtcgaacccaaataaa

SEQ ID NO: 4009 - DNA, 36 bp, synthetic construct
  misc_feature 1..36: note = Synthetic oligonucleotide
  source 1..36: mol_type = other DNA
aacacttctaggttcgcaaccccttataaccctaaa

SEQ ID NO: 4010 - DNA, 35 bp, synthetic construct
  misc_feature 1..35: note = Synthetic oligonucleotide
  source 1..35: mol_type = other DNA
actccgcaatattccttttaaatttaggttgcaac

SEQ ID NO: 4011 - DNA, 35 bp, synthetic construct
  misc_feature 1..35: note = Synthetic oligonucleotide
  source 1..35: mol_type = other DNA
acttcaacgagcgttgatagctcggattttatcaa

SEQ ID NO: 4012 - DNA, 36 bp, synthetic construct
  misc_feature 1..36: note = Synthetic oligonucleotide
  source 1..36: mol_type = other DNA
tctgcataacaaactcgacacgccctagccccaata

SEQ ID NO: 4013 - DNA, 37 bp, synthetic construct
  misc_feature 1..37: note = Synthetic oligonucleotide
  source 1..37: mol_type = other DNA
gagtacctcatcgcatatcgagcgcactttatacaga

SEQ ID NO: 4014 - DNA, 35 bp, synthetic construct
  misc_feature 1..35: note = Synthetic oligonucleotide
  source 1..35: mol_type = other DNA
accccaataccattgcacctgaggactcaatcaat

SEQ ID NO: 4015 - DNA, 36 bp, synthetic construct
  misc_feature 1..36: note = Synthetic oligonucleotide
  source 1..36: mol_type = other DNA
ttccaccgagttcctttccagccaatatagcatata

SEQ ID NO: 4016 - DNA, 35 bp, synthetic construct
  misc_feature 1..35: note = Synthetic oligonucleotide
  source 1..35: mol_type = other DNA
ctcattcgctaccaaccctgtgatctcttctaaac

SEQ ID NO: 4017 - DNA, 35 bp, synthetic construct
  misc_feature 1..35: note = Synthetic oligonucleotide
  source 1..35: mol_type = other DNA
aactgtcatccgccgactaactcaatctaactaca

SEQ ID NO: 4018 - DNA, 36 bp, synthetic construct
  misc_feature 1..36: note = Synthetic oligonucleotide
  source 1..36: mol_type = other DNA
gagtactggcacgcgataccctaactgtacatcaaa

SEQ ID NO: 4019 - DNA, 37 bp, synthetic construct
  misc_feature 1..37: note = Synthetic oligonucleotide
  source 1..37: mol_type = other DNA
ggctgcacttatctgtaacacatcactattccccaga

SEQ ID NO: 4020 - DNA, 36 bp, synthetic construct
  misc_feature 1..36: note = Synthetic oligonucleotide
  source 1..36: mol_type = other DNA
tatctcaactcttctatatcacatgaccataataaa

SEQ ID NO: 4021 - DNA, 35 bp, synthetic construct
  misc_feature 1..35: note = Synthetic oligonucleotide
  source 1..35: mol_type = other DNA
tgaacacgaaaaaactaagcattaaatcacacacc

SEQ ID NO: 4022 - DNA, 35 bp, synthetic construct
  misc_feature 1..35: note = Synthetic oligonucleotide
  source 1..35: mol_type = other DNA
aattaaccaacaaacccataacgagtccctttatt

SEQ ID NO: 4023 - DNA, 35 bp, synthetic construct
  misc_feature 1..35: note = Synthetic oligonucleotide
  source 1..35: mol_type = other DNA
aatgtaactggcaatttctttctcactgatttctc

SEQ ID NO: 4024 - DNA, 36 bp, synthetic construct
  misc_feature 1..36: note = Synthetic oligonucleotide
  source 1..36: mol_type = other DNA
acaatactgcctccacacttccaccttcttttgtca

SEQ ID NO: 4025 - DNA, 35 bp, synthetic construct
  misc_feature 1..35: note = Synthetic oligonucleotide
  source 1..35: mol_type = other DNA
acactatcaagcgcttcgcatttcctttctccaat

SEQ ID NO: 4026 - DNA, 35 bp, synthetic construct
  misc_feature 1..35: note = Synthetic oligonucleotide
  source 1..35: mol_type = other DNA
acccgtgcggcttaaccttatcttctttatttcat

SEQ ID NO: 4027 - DNA, 35 bp, synthetic construct
  misc_feature 1..35: note = Synthetic oligonucleotide
  source 1..35: mol_type = other DNA
accgctggggctctttccgacaatttcttccattt

SEQ ID NO: 4028 - DNA, 35 bp, synthetic construct
  misc_feature 1..35: note = Synthetic oligonucleotide
  source 1..35: mol_type = other DNA
acgcaaccgtagcaaatttcttagtgttttttttt

SEQ ID NO: 4029 - DNA, 38 bp, synthetic construct
  misc_feature 1..38: note = Synthetic oligonucleotide
  source 1..38: mol_type = other DNA
acgggtcacgccttccactttacttggttttattttga

SEQ ID NO: 4030 - DNA, 36 bp, synthetic construct
  misc_feature 1..36: note = Synthetic oligonucleotide
  source 1..36: mol_type = other DNA
agcagtcattttacttctgttttccttaaaattcta

SEQ ID NO: 4031 - DNA, 38 bp, synthetic construct
  misc_feature 1..38: note = Synthetic oligonucleotide
  source 1..38: mol_type = other DNA
agccagtcacaacttctcgtttcgctctctttttctga

SEQ ID NO: 4032 - DNA, 38 bp, synthetic construct
  misc_feature 1..38: note = Synthetic oligonucleotide
  source 1..38: mol_type = other DNA
agctaccggggtttaccttcctttcttctctcctctga

SEQ ID NO: 4033 - DNA, 38 bp, synthetic construct
  misc_feature 1..38: note = Synthetic oligonucleotide
  source 1..38: mol_type = other DNA
agttggcttgtcatcatttttttgcttatcttctctga

SEQ ID NO: 4034 - DNA, 36 bp, synthetic construct
  misc_feature 1..36: note = Synthetic oligonucleotide
  source 1..36: mol_type = other DNA
atccaaacgatcaccttggtctctctttacttttca

SEQ ID NO: 4035 - DNA, 35 bp, synthetic construct
  misc_feature 1..35: note = Synthetic oligonucleotide
  source 1..35: mol_type = other DNA
atccttatttctatctcatcctcttgtcgccgact

SEQ ID NO: 4036 - DNA, 35 bp, synthetic construct
  misc_feature 1..35: note = Synthetic oligonucleotide
  source 1..35: mol_type = other DNA
atcgaaggtactacgtaaatttctcattctctttt

SEQ ID NO: 4037 - DNA, 35 bp, synthetic construct
  misc_feature 1..35: note = Synthetic oligonucleotide
  source 1..35: mol_type = other DNA
atggtctgtcatggcaccgattacatttctttctc

SEQ ID NO: 4038 - DNA, 35 bp, synthetic construct
  misc_feature 1..35: note = Synthetic oligonucleotide
  source 1..35: mol_type = other DNA
atgtgctcttcgttatttctcttatttctatcttt

SEQ ID NO: 4039 - DNA, 35 bp, synthetic construct
  misc_feature 1..35: note = Synthetic oligonucleotide
  source 1..35: mol_type = other DNA
attacttctgctccattttccttttttcatacatt

SEQ ID NO: 4040 - DNA, 35 bp, synthetic construct
  misc_feature 1..35: note = Synthetic oligonucleotide
  source 1..35: mol_type = other DNA
attcctgcgttgcgtatcttccttcgcttattttc

SEQ ID NO: 4041 - DNA, 37 bp, synthetic construct
  misc_feature 1..37: note = Synthetic oligonucleotide
  source 1..37: mol_type = other DNA
ccccactatttatccgcacatcttttgttctctttga

SEQ ID NO: 4042 - DNA, 35 bp, synthetic construct
  misc_feature 1..35: note = Synthetic oligonucleotide
  source 1..35: mol_type = other DNA
cctccgccttactttcttatttctctttacgaatt

SEQ ID NO: 4043 - DNA, 35 bp, synthetic construct
  misc_feature 1..35: note = Synthetic oligonucleotide
  source 1..35: mol_type = other DNA
cgaggaccgacttttccacttatctttgccctttt

SEQ ID NO: 4044 - DNA, 37 bp, synthetic construct
  misc_feature 1..37: note = Synthetic oligonucleotide
  source 1..37: mol_type = other DNA
ctccatcgaactctatctctttttcttaacaatccga

SEQ ID NO: 4045 - DNA, 36 bp, synthetic construct
  misc_feature 1..36: note = Synthetic oligonucleotide
  source 1..36: mol_type = other DNA
gagtacctcacaattttcccgcgacgccctttttta

SEQ ID NO: 4046 - DNA, 37 bp, synthetic construct
  misc_feature 1..37: note = Synthetic oligonucleotide
  source 1..37: mol_type = other DNA
gatcccgttccttttttaacgctctattttcttttga

SEQ ID NO: 4047 - DNA, 35 bp, synthetic construct
  misc_feature 1..35: note = Synthetic oligonucleotide
  source 1..35: mol_type = other DNA
gcaaatgcctttcattacccattgcttttctgaca

SEQ ID NO: 4048 - DNA, 36 bp, synthetic construct
  misc_feature 1..36: note = Synthetic oligonucleotide
  source 1..36: mol_type = other DNA
gcaatgaacacctacacatacctgcctacacgatta

SEQ ID NO: 4049 - DNA, 36 bp, synthetic construct
  misc_feature 1..36: note = Synthetic oligonucleotide
  source 1..36: mol_type = other DNA
gcaatttttcattcttagggtttctctcacttccca

SEQ ID NO: 4050 - DNA, 38 bp, synthetic construct
  misc_feature 1..38: note = Synthetic oligonucleotide
  source 1..38: mol_type = other DNA
gcacatttcttaacttttctgtttggatttaccaatga

SEQ ID NO: 4051 - DNA, 37 bp, synthetic construct
  misc_feature 1..37: note = Synthetic oligonucleotide
  source 1..37: mol_type = other DNA
gcacggcttacgctcttcttttccgctatctatttga

SEQ ID NO: 4052 - DNA, 36 bp, synthetic construct
  misc_feature 1..36: note = Synthetic oligonucleotide
  source 1..36: mol_type = other DNA
gcagttcgcctccactcactcttttccgatttatca

SEQ ID NO: 4053 - DNA, 35 bp, synthetic construct
  misc_feature 1..35: note = Synthetic oligonucleotide
  source 1..35: mol_type = other DNA
gcatcctcccgtgtcgctcacttttcctttgcttc

SEQ ID NO: 4054 - DNA, 38 bp, synthetic construct
  misc_feature 1..38: note = Synthetic oligonucleotide
  source 1..38: mol_type = other DNA
gccaactttgaatgggctctcatcctatctctctttga

SEQ ID NO: 4055 - DNA, 36 bp, synthetic construct
  misc_feature 1..36: note = Synthetic oligonucleotide
  source 1..36: mol_type = other DNA
gcccgcgctcgcatcctatttcttctttttttgtaa

SEQ ID NO: 4056 - DNA, 35 bp, synthetic construct
  misc_feature 1..35: note = Synthetic oligonucleotide
  source 1..35: mol_type = other DNA
gccctcgtactcttctttggaacttactttcattt

SEQ ID NO: 4057 - DNA, 37 bp, synthetic construct
  misc_feature 1..37: note = Synthetic oligonucleotide
  source 1..37: mol_type = other DNA
gccgcattatttcgttttttcttcactctgcacttga

SEQ ID NO: 4058 - DNA, 38 bp, synthetic construct
  misc_feature 1..38: note = Synthetic oligonucleotide
  source 1..38: mol_type = other DNA
gcctatcttactatatctcgtttactttccttatatga

SEQ ID NO: 4059 - DNA, 37 bp, synthetic construct
  misc_feature 1..37: note = Synthetic oligonucleotide
  source 1..37: mol_type = other DNA
gcctgtacctgtttacttttatcaatcttgtgcttga

SEQ ID NO: 4060 - DNA, 36 bp, synthetic construct
  misc_feature 1..36: note = Synthetic oligonucleotide
  source 1..36: mol_type = other DNA
gccttccgcttggtgttttttttacttttagatcta

SEQ ID NO: 4061 - DNA, 35 bp, synthetic construct
  misc_feature 1..35: note = Synthetic oligonucleotide
  source 1..35: mol_type = other DNA
gcgatggtctaccttcttttaacaaattttcgctc

SEQ ID NO: 4062 - DNA, 38 bp, synthetic construct
  misc_feature 1..38: note = Synthetic oligonucleotide
  source 1..38: mol_type = other DNA
gcgccttacgttaattcacatatccctttaccatctga

SEQ ID NO: 4063 - DNA, 38 bp, synthetic construct
  misc_feature 1..38: note = Synthetic oligonucleotide
  source 1..38: mol_type = other DNA
gcggtctgggaatttctaccctgcttctatctttttga

SEQ ID NO: 4064 - DNA, 35 bp, synthetic construct
  misc_feature 1..35: note = Synthetic oligonucleotide
  source 1..35: mol_type = other DNA
gctacgccttactctctgataatctccactttccg

SEQ ID NO: 4065 - DNA, 35 bp, synthetic construct
  misc_feature 1..35: note = Synthetic oligonucleotide
  source 1..35: mol_type = other DNA
gctatctgagctcccgctttctttcgattatatat

SEQ ID NO: 4066 - DNA, 35 bp, synthetic construct
  misc_feature 1..35: note = Synthetic oligonucleotide
  source 1..35: mol_type = other DNA
ggcccgatttcctatgtcatttggttttttctttc

SEQ ID NO: 4067 - DNA, 35 bp, synthetic construct
  misc_feature 1..35: note = Synthetic oligonucleotide
  source 1..35: mol_type = other DNA
ggccgtcgcatacctagatttctttatcctttttc

SEQ ID NO: 4068 - DNA, 38 bp, synthetic construct
  misc_feature 1..38: note = Synthetic oligonucleotide
  source 1..38: mol_type = other DNA
ggcgccaatttccttctatcgcaattcatttcctctga

SEQ ID NO: 4069 - DNA, 36 bp, synthetic construct
  misc_feature 1..36: note = Synthetic oligonucleotide
  source 1..36: mol_type = other DNA
ggctaggccgccttcttatctttatgcccttgttaa

SEQ ID NO: 4070 - DNA, 35 bp, synthetic construct
  misc_feature 1..35: note = Synthetic oligonucleotide
  source 1..35: mol_type = other DNA
ggcttcttatttgcttgaatatccgcttcctctat

SEQ ID NO: 4071 - DNA, 36 bp, synthetic construct
  misc_feature 1..36: note = Synthetic oligonucleotide
  source 1..36: mol_type = other DNA
gggcacggttttttcttttctggtcgctatccctta

SEQ ID NO: 4072 - DNA, 35 bp, synthetic construct
  misc_feature 1..35: note = Synthetic oligonucleotide
  source 1..35: mol_type = other DNA
ggtaccctgattttttctcgcctattttaatattt

SEQ ID NO: 4073 - DNA, 35 bp, synthetic construct
  misc_feature 1..35: note = Synthetic oligonucleotide
  source 1..35: mol_type = other DNA
ggtccaattacccttttcaacttatcgcaccattt

SEQ ID NO: 4074 - DNA, 36 bp, synthetic construct
  misc_feature 1..36: note = Synthetic oligonucleotide
  source 1..36: mol_type = other DNA
gtttcgtggtatgcgaaccttctattacttatttta

SEQ ID NO: 4075 - DNA, 35 bp, synthetic construct
  misc_feature 1..35: note = Synthetic oligonucleotide
  source 1..35: mol_type = other DNA
gttttcttcccggttaaccctttattttttttggt

SEQ ID NO: 4076 - DNA, 38 bp, synthetic construct
  misc_feature 1..38: note = Synthetic oligonucleotide
  source 1..38: mol_type = other DNA
tacactttctctagttactactcaccttctttctctga

SEQ ID NO: 4077 - DNA, 35 bp, synthetic construct
  misc_feature 1..35: note = Synthetic oligonucleotide
  source 1..35: mol_type = other DNA
tagttacttttaatcaatactctctatttttttgc

SEQ ID NO: 4078 - DNA, 35 bp, synthetic construct
  misc_feature 1..35: note = Synthetic oligonucleotide
  source 1..35: mol_type = other DNA
tatccttcgcattattctttctcatcggtccttta

SEQ ID NO: 4079 - DNA, 35 bp, synthetic construct
  misc_feature 1..35: note = Synthetic oligonucleotide
  source 1..35: mol_type = other DNA
tatctttattgctctgggtgattgcctcttgtttt

SEQ ID NO: 4080 - DNA, 35 bp, synthetic construct
  misc_feature 1..35: note = Synthetic oligonucleotide
  source 1..35: mol_type = other DNA
tatttcccacgctattcatctattctctttacctt

SEQ ID NO: 4081 - DNA, 36 bp, synthetic construct
  misc_feature 1..36: note = Synthetic oligonucleotide
  source 1..36: mol_type = other DNA
tccactggcttggcattgcctccttgatccttctta

SEQ ID NO: 4082 - DNA, 35 bp, synthetic construct
  misc_feature 1..35: note = Synthetic oligonucleotide
  source 1..35: mol_type = other DNA
tccagcacgcaacctcagcttcatctttttctctt

SEQ ID NO: 4083 - DNA, 35 bp, synthetic construct
  misc_feature 1..35: note = Synthetic oligonucleotide
  source 1..35: mol_type = other DNA
tccatttgtactgtgcgcctaattttctactcttt

SEQ ID NO: 4084 - DNA, 35 bp, synthetic construct
  misc_feature 1..35: note = Synthetic oligonucleotide
  source 1..35: mol_type = other DNA
tccgacctggttatttttttgcctttttctattat

SEQ ID NO: 4085 - DNA, 36 bp, synthetic construct
  misc_feature 1..36: note = Synthetic oligonucleotide
  source 1..36: mol_type = other DNA
tcgcgatttcccatgtctctatacttcttacaccca

SEQ ID NO: 4086 - DNA, 35 bp, synthetic construct
  misc_feature 1..35: note = Synthetic oligonucleotide
  source 1..35: mol_type = other DNA
tcgtacgagatgcactctttctacttaagttttct

SEQ ID NO: 4087 - DNA, 37 bp, synthetic construct
  misc_feature 1..37: note = Synthetic oligonucleotide
  source 1..37: mol_type = other DNA
tcgtcattgccttcctttttcatgtttcattttctga

SEQ ID NO: 4088 - DNA, 35 bp, synthetic construct
  misc_feature 1..35: note = Synthetic oligonucleotide
  source 1..35: mol_type = other DNA
tcgtgatctctatttggtttcttccacgcatttct

SEQ ID NO: 4089 - DNA, 36 bp, synthetic construct
  misc_feature 1..36: note = Synthetic oligonucleotide
  source 1..36: mol_type = other DNA
tcgttctatccgtttgtgcatcttccttctttacca

SEQ ID NO: 4090 - DNA, 35 bp, synthetic construct
  misc_feature 1..35: note = Synthetic oligonucleotide
  source 1..35: mol_type = other DNA
tctaggcatctccgcttcctaaatttctttctgta

SEQ ID NO: 4091 - DNA, 35 bp, synthetic construct
  misc_feature 1..35: note = Synthetic oligonucleotide
  source 1..35: mol_type = other DNA
tctgcccgcactactaaatttttatctcttcacta

SEQ ID NO: 4092 - DNA, 36 bp, synthetic construct
  misc_feature 1..36: note = Synthetic oligonucleotide
  source 1..36: mol_type = other DNA
tctttagcatctcatcttttctgccctcacgcctta

SEQ ID NO: 4093 - DNA, 35 bp, synthetic construct
  misc_feature 1..35: note = Synthetic oligonucleotide
  source 1..35: mol_type = other DNA
tgcacgaggattaccttttctttttctcgattctt

SEQ ID NO: 4094 - DNA, 36 bp, synthetic construct
  misc_feature 1..36: note = Synthetic oligonucleotide
  source 1..36: mol_type = other DNA
tgcttatcccgggaatatcctttgctctcttttcca

SEQ ID NO: 4095 - DNA, 38 bp, synthetic construct
  misc_feature 1..38: note = Synthetic oligonucleotide
  source 1..38: mol_type = other DNA
tggctctcacgtctccattttattttctatttttctga

SEQ ID NO: 4096 - DNA, 37 bp, synthetic construct
  misc_feature 1..37: note = Synthetic oligonucleotide
  source 1..37: mol_type = other DNA
tggggcttaaccatctcttctttctcttttaccagga

SEQ ID NO: 4097 - DNA, 36 bp, synthetic construct
  misc_feature 1..36: note = Synthetic oligonucleotide
  source 1..36: mol_type = other DNA
tggtactaacctctatctcatcctaaaatctcttta

SEQ ID NO: 4098 - DNA, 35 bp, synthetic construct
  misc_feature 1..35: note = Synthetic oligonucleotide
  source 1..35: mol_type = other DNA
tgtcgacctttaccttattcatttgaaatcgcttt

SEQ ID NO: 4099 - DNA, 36 bp, synthetic construct
  misc_feature 1..36: note = Synthetic oligonucleotide
  source 1..36: mol_type = other DNA
ttccttgcaatttcctttctttttattcatccggca

SEQ ID NO: 4100 - DNA, 37 bp, synthetic construct
  misc_feature 1..37: note = Synthetic oligonucleotide
  source 1..37: mol_type = other DNA
ttcgacccttttccatactttttctcacgcaaattga

SEQ ID NO: 4101 - DNA, 38 bp, synthetic construct
  misc_feature 1..38: note = Synthetic oligonucleotide
  source 1..38: mol_type = other DNA
ttctcgatcctttgccgcatttctcacttttctgttga

SEQ ID NO: 4102 - DNA, 36 bp, synthetic construct
  misc_feature 1..36: note = Synthetic oligonucleotide
  source 1..36: mol_type = other DNA
ttctcgtagctacaaatcctttaacacttctcttca

SEQ ID NO: 4103 - DNA, 38 bp, synthetic construct
  misc_feature 1..38: note = Synthetic oligonucleotide
  source 1..38: mol_type = other DNA
ttgcgacgcctctactttcaccccactaaaatttctga

SEQ ID NO: 4104 - DNA, 35 bp, synthetic construct
  misc_feature 1..35: note = Synthetic oligonucleotide
  source 1..35: mol_type = other DNA
ttgtacgttcgctttattttgcattccgccttttt

SEQ ID NO: 4105 - DNA, 37 bp, synthetic construct
  misc_feature 1..37: note = Synthetic oligonucleotide
  source 1..37: mol_type = other DNA
tttcctcgctatttctgtctctttgcccttcttggga

SEQ ID NO: 4106 - DNA, 37 bp, synthetic construct
  misc_feature 1..37: note = Synthetic oligonucleotide
  source 1..37: mol_type = other DNA
ttttcaggtacgaccccatacttttttttcattttga

SEQ ID NO: 4107 - DNA, 35 bp, synthetic construct
  misc_feature 1..35: note = Synthetic oligonucleotide
  source 1..35: mol_type = other DNA
aacgccgtacagttgctgatttcacccactctttt

SEQ ID NO: 4108 - DNA, 35 bp, synthetic construct
  misc_feature 1..35: note = Synthetic oligonucleotide
  source 1..35: mol_type = other DNA
actccttctaaaattacacttatatcacccatacc

SEQ ID NO: 4109 - DNA, 35 bp, synthetic construct
  misc_feature 1..35: note = Synthetic oligonucleotide
  source 1..35: mol_type = other DNA
agaaccgtccctgcatttttattggttattttttt

SEQ ID NO: 4110 - DNA, 38 bp, synthetic construct
  misc_feature 1..38: note = Synthetic oligonucleotide
  source 1..38: mol_type = other DNA
cttgcatattgttcttcctgtttgctttttcttcttga

SEQ ID NO: 4111 - DNA, 35 bp, synthetic construct
  misc_feature 1..35: note = Synthetic oligonucleotide
  source 1..35: mol_type = other DNA
gagtaccctattacgctccccccccattatctctt

SEQ ID NO: 4112 - DNA, 38 bp, synthetic construct
  misc_feature 1..38: note = Synthetic oligonucleotide
  source 1..38: mol_type = other DNA
gcaccttctattttcaccccgatttaccctttgcctga

SEQ ID NO: 4113 - DNA, 38 bp, synthetic construct
  misc_feature 1..38: note = Synthetic oligonucleotide
  source 1..38: mol_type = other DNA
gccgccttgggtccattattatctttatatttttctga

SEQ ID NO: 4114 - DNA, 38 bp, synthetic construct
  misc_feature 1..38: note = Synthetic oligonucleotide
  source 1..38: mol_type = other DNA
gccgcttgcctttatttatcatacgctattaatcttga

SEQ ID NO: 4115 - DNA, 35 bp, synthetic construct
  misc_feature 1..35: note = Synthetic oligonucleotide
  source 1..35: mol_type = other DNA
gcctggttatctttgaatagctttcgtattccttt

SEQ ID NO: 4116 - DNA, 36 bp, synthetic construct
  misc_feature 1..36: note = Synthetic oligonucleotide
  source 1..36: mol_type = other DNA
gccttgcatcttcacttatggtgtcttaccacttta

SEQ ID NO: 4117 - DNA, 35 bp, synthetic construct
  misc_feature 1..35: note = Synthetic oligonucleotide
  source 1..35: mol_type = other DNA
gcgaggctattatctctggcgctgttcgcccactt

SEQ ID NO: 4118 - DNA, 37 bp, synthetic construct
  misc_feature 1..37: note = Synthetic oligonucleotide
  source 1..37: mol_type = other DNA
gctagcatgcactcctttacttcttctcatcacacga

SEQ ID NO: 4119 - DNA, 37 bp, synthetic construct
  misc_feature 1..37: note = Synthetic oligonucleotide
  source 1..37: mol_type = other DNA
gttcaacttatcttcctttttctttctgggactggga

SEQ ID NO: 4120 - DNA, 35 bp, synthetic construct
  misc_feature 1..35: note = Synthetic oligonucleotide
  source 1..35: mol_type = other DNA
taccgctccactcttctttattttcggtatctttc

SEQ ID NO: 4121 - DNA, 35 bp, synthetic construct
  misc_feature 1..35: note = Synthetic oligonucleotide
  source 1..35: mol_type = other DNA
tctagccgtcactattcttcgtacgtttccatcct

SEQ ID NO: 4122 - DNA, 38 bp, synthetic construct
  misc_feature 1..38: note = Synthetic oligonucleotide
  source 1..38: mol_type = other DNA
tctcactactcgctctttttccttttctccacttatga

SEQ ID NO: 4123 - DNA, 35 bp, synthetic construct
  misc_feature 1..35: note = Synthetic oligonucleotide
  source 1..35: mol_type = other DNA
tcttacctaatttcttactctgccactttacacgc

SEQ ID NO: 4124 - DNA, 38 bp, synthetic construct
  misc_feature 1..38: note = Synthetic oligonucleotide
  source 1..38: mol_type = other DNA
tggtacgtactcgcgccgcggtctttttcttttcctga

SEQ ID NO: 4125 - DNA, 36 bp, synthetic construct
  misc_feature 1..36: note = Synthetic oligonucleotide
  source 1..36: mol_type = other DNA
ttttacttacccataatttccttacattactttata

SEQ ID NO: 4126 - DNA, 36 bp, synthetic construct
  misc_feature 1..36: note = Synthetic oligonucleotide
  source 1..36: mol_type = other DNA
aaatagctcgcacgagtagccccgatagaaacataa

SEQ ID NO: 4127 - DNA, 37 bp, synthetic construct
  misc_feature 1..37: note = Synthetic oligonucleotide
  source 1..37: mol_type = other DNA
aatcaaatcatacaatagagaccgaaattacaaccga

SEQ ID NO: 4128 - DNA, 36 bp, synthetic construct
  misc_feature 1..36: note = Synthetic oligonucleotide
  source 1..36: mol_type = other DNA
acaggcttggttcaacgaaaatcttcagttccggaa

SEQ ID NO: 4129 - DNA, 35 bp, synthetic construct
  misc_feature 1..35: note = Synthetic oligonucleotide
  source 1..35: mol_type = other DNA
accctggggtgtccgggataaaaatatacaaatca

SEQ ID NO: 4130 - DNA, 36 bp, synthetic construct
  misc_feature 1..36: note = Synthetic oligonucleotide
  source 1..36: mol_type = other DNA
agagaataaaatgggggctagaagctaaaaatataa

SEQ ID NO: 4131 - DNA, 38 bp, synthetic construct
  misc_feature 1..38: note = Synthetic oligonucleotide
  source 1..38: mol_type = other DNA
cgtgcacattctaacggaatcagtaccacacaccatga

SEQ ID NO: 4132 - DNA, 35 bp, synthetic construct
  misc_feature 1..35: note = Synthetic oligonucleotide
  source 1..35: mol_type = other DNA
ctgcttaaaactatcccataatcctaatgaccgga

SEQ ID NO: 4133 - DNA, 36 bp, synthetic construct
  misc_feature 1..36: note = Synthetic oligonucleotide
  source 1..36: mol_type = other DNA
gaatgatttacaccacaattagactactgatatcaa

SEQ ID NO: 4134 - DNA, 37 bp, synthetic construct
  misc_feature 1..37: note = Synthetic oligonucleotide
  source 1..37: mol_type = other DNA
gagttgctgcaagggactccctgaacacttatgacga

SEQ ID NO: 4135 - DNA, 37 bp, synthetic construct
  misc_feature 1..37: note = Synthetic oligonucleotide
  source 1..37: mol_type = other DNA
gcgccgaatagttcgacccgaaaccctaatgaatcga

SEQ ID NO: 4136 - DNA, 38 bp, synthetic construct
  misc_feature 1..38: note = Synthetic oligonucleotide
  source 1..38: mol_type = other DNA
gggctgtgcaaacacaatatataaaaactcaacattga

SEQ ID NO: 4137 - DNA, 35 bp, synthetic construct
  misc_feature 1..35: note = Synthetic oligonucleotide
  source 1..35: mol_type = other DNA
ggtctgcccctgaccgactcaaccgattaagaaca

SEQ ID NO: 4138 - DNA, 35 bp, synthetic construct
  misc_feature 1..35: note = Synthetic oligonucleotide
  source 1..35: mol_type = other DNA
taaaacgaaactaggaaagatacacctaaaaagaa

SEQ ID NO: 4139 - DNA, 35 bp, synthetic construct
  misc_feature 1..35: note = Synthetic oligonucleotide
  source 1..35: mol_type = other DNA
tactaacaacgggtagaccgacgaatacccacaca

SEQ ID NO: 4140 - DNA, 38 bp, synthetic construct
  misc_feature 1..38: note = Synthetic oligonucleotide
  source 1..38: mol_type = other DNA
tactggagggctacaacctgctacatagatacacatga

SEQ ID NO: 4141 - DNA, 37 bp, synthetic construct
  misc_feature 1..37: note = Synthetic oligonucleotide
  source 1..37: mol_type = other DNA
tataacgccctaacatattgactacgagagactggga

SEQ ID NO: 4142 - DNA, 36 bp, synthetic construct
  misc_feature 1..36: note = Synthetic oligonucleotide
  source 1..36: mol_type = other DNA
tcaatatcccgtcctcggggctagttatagtctaaa

SEQ ID NO: 4143 - DNA, 37 bp, synthetic construct
  misc_feature 1..37: note = Synthetic oligonucleotide
  source 1..37: mol_type = other DNA
tcccataataaaccctatcaagtgtagacaaacatga

SEQ ID NO: 4144 - DNA, 37 bp, synthetic construct
  misc_feature 1..37: note = Synthetic oligonucleotide
  source 1..37: mol_type = other DNA
tcgaacccgccacaaaatacttaagtcagtcaacaga

SEQ ID NO: 4145 - DNA, 35 bp, synthetic construct
  misc_feature 1..35: note = Synthetic oligonucleotide
  source 1..35: mol_type = other DNA
tcgcattcccgacaaaatatatactggactacttc

SEQ ID NO: 4146 - DNA, 36 bp, synthetic construct
  misc_feature 1..36: note = Synthetic oligonucleotide
  source 1..36: mol_type = other DNA
tgaaccgttatattaccaaattagagcttagaaata

SEQ ID NO: 4147 - DNA, 38 bp, synthetic construct
  misc_feature 1..38: note = Synthetic oligonucleotide
  source 1..38: mol_type = other DNA
tgacatactataaccggggccattaataatacacatga

SEQ ID NO: 4148 - DNA, 36 bp, synthetic construct
  misc_feature 1..36: note = Synthetic oligonucleotide
  source 1..36: mol_type = other DNA
tgcaacgtaaaacacacaaactctaatgataccgga

SEQ ID NO: 4149 - DNA, 36 bp, synthetic construct
  misc_feature 1..36: note = Synthetic oligonucleotide
  source 1..36: mol_type = other DNA
tgcgacaacagccattcgggaactacccgatcacca

SEQ ID NO: 4150 - DNA, 36 bp, synthetic construct
  misc_feature 1..36: note = Synthetic oligonucleotide
  source 1..36: mol_type = other DNA
ttccggctataatacaaacatatcacccgacttgaa

SEQ ID NO: 4151 - skipped

SEQ ID NO: 4152 - DNA, 38 bp, synthetic construct
  misc_feature 1..38: note = Synthetic oligonucleotide
  source 1..38: mol_type = other DNA
actatagaacaatccaccgctttaaatcaactatctga

SEQ ID NO: 4153 - DNA, 38 bp, synthetic construct
  misc_feature 1..38: note = Synthetic oligonucleotide
  source 1..38: mol_type = other DNA
actatagaacaatccaccgctttaaatcaactatctca

SEQ ID NO: 4154 - DNA, 38 bp, synthetic construct
  misc_feature 1..38: note = Synthetic oligonucleotide
  source 1..38: mol_type = other DNA
actatagaacaatccaccgctttaaatcaactatctaa

SEQ ID NO: 4155 - DNA, 38 bp, synthetic construct
  misc_feature 1..38: note = Synthetic oligonucleotide
  source 1..38: mol_type = other DNA
actatagaacaatccaccgctttaaataaactatctga

SEQ ID NO: 4156 - DNA, 38 bp, synthetic construct
  misc_feature 1..38: note = Synthetic oligonucleotide
  source 1..38: mol_type = other DNA
actatagaacaatccacctctttaaatcaactatctga

SEQ ID NO: 4157 - DNA, 38 bp, synthetic construct
  misc_feature 1..38: note = Synthetic oligonucleotide
  source 1..38: mol_type = other DNA
actatagaacaatccaccgctttaaatcaactatccga

SEQ ID NO: 4158 - DNA, 38 bp, synthetic construct
  misc_feature 1..38: note = Synthetic oligonucleotide
  source 1..38: mol_type = other DNA
aatatagaacaatccaccgctttaaatcaactatctga

SEQ ID NO: 4159 - DNA, 38 bp, synthetic construct
  misc_feature 1..38: note = Synthetic oligonucleotide
  source 1..38: mol_type = other DNA
actatagaacaatccaccgctttaaatcaactatccta

SEQ ID NO: 4160 - DNA, 38 bp, synthetic construct
  misc_feature 1..38: note = Synthetic oligonucleotide
  source 1..38: mol_type = other DNA
actatagaacaatccacctctttaaatcaactatctta

SEQ ID NO: 4161 - DNA, 38 bp, synthetic construct
  misc_feature 1..38: note = Synthetic oligonucleotide
  source 1..38: mol_type = other DNA
actatagaacaatcccccgctttaaatcaactatctga

SEQ ID NO: 4162 - DNA, 38 bp, synthetic construct
  misc_feature 1..38: note = Synthetic oligonucleotide
  source 1..38: mol_type = other DNA
actatagaacaatccgccgctttaaatcaactatctga

SEQ ID NO: 4163 - DNA, 38 bp, synthetic construct
  misc_feature 1..38: note = Synthetic oligonucleotide
  source 1..38: mol_type = other DNA
actatagaacaatcctccgctttaaatcaactatctga

SEQ ID NO: 4164 - DNA, 38 bp, synthetic construct
  misc_feature 1..38: note = Synthetic oligonucleotide
  source 1..38: mol_type = other DNA
actatataacaatccaccgctttaaatcaactatctga

SEQ ID NO: 4165 - DNA, 38 bp, synthetic construct
  misc_feature 1..38: note = Synthetic oligonucleotide
  source 1..38: mol_type = other DNA
tacccctgacaatcctcgcgccgaggcctccatcctaa

SEQ ID NO: 4166 - DNA, 38 bp, synthetic construct; identical to SEQ ID NO: 4165
  misc_feature 1..38: note = Synthetic oligonucleotide
  source 1..38: mol_type = other DNA

SEQ ID NO: 4167 - DNA, 36 bp, synthetic construct
  misc_feature 1..36: note = Synthetic oligonucleotide
  source 1..36: mol_type = other DNA
gattttaaaacccttgcacctgattgtgccaatcaa

SEQ ID NO: 4168 - DNA, 36 bp, synthetic construct
  misc_feature 1..36: note = Synthetic oligonucleotide
  source 1..36: mol_type = other DNA
gattttaaaacccttgcacctgattgtgccaatcga

SEQ ID NO: 4169 - DNA, 36 bp, synthetic construct
  misc_feature 1..36: note = Synthetic oligonucleotide
  source 1..36: mol_type = other DNA
gattttaaaacccttgcacctgattgtgccaatcta

SEQ ID NO: 4170 - DNA, 36 bp, synthetic construct
  misc_feature 1..36: note = Synthetic oligonucleotide
  source 1..36: mol_type = other DNA
aacccaattcacatacactctcaccctcactaaaca

SEQ ID NO: 4171 - DNA, 36 bp, synthetic construct
  misc_feature 1..36: note = Synthetic oligonucleotide
  source 1..36: mol_type = other DNA
aacccaattcacatacactctcaccctcactaaaaa

SEQ ID NO: 4172 - DNA, 36 bp, synthetic construct
  misc_feature 1..36: note = Synthetic oligonucleotide
  source 1..36: mol_type = other DNA
aacccaattcacatacactctcaccctcactaaaga

SEQ ID NO: 4173 - DNA, 36 bp, synthetic construct
  misc_feature 1..36: note = Synthetic oligonucleotide
  source 1..36: mol_type = other DNA
aacccaattcacatacactctcaccctcactaaata

SEQ ID NO: 4174 - DNA, 36 bp, synthetic construct
  misc_feature 1..36: note = Synthetic oligonucleotide
  source 1..36: mol_type = other DNA
aacccaattcacatacactctcaccctcactaacca

SEQ ID NO: 4175 - DNA, 36 bp, synthetic construct
  misc_feature 1..36: note = Synthetic oligonucleotide
  source 1..36: mol_type = other DNA
aacccaattcacatacactctcaccctcactaacaa

SEQ ID NO: 4176 - DNA, 36 bp, synthetic construct
  misc_feature 1..36: note = Synthetic oligonucleotide
  source 1..36: mol_type = other DNA
aacccaattcacatacactctctccctcactaaaca

SEQ ID NO: 4177 - DNA, 36 bp, synthetic construct
  misc_feature 1..36: note = Synthetic oligonucleotide
  source 1..36: mol_type = other DNA
aacccaattcacatacactctccccctcactaaaca

SEQ ID NO: 4178 - DNA, 36 bp, synthetic construct
  misc_feature 1..36: note = Synthetic oligonucleotide
  source 1..36: mol_type = other DNA
aacccaattcacatacactctcgccctcactaaaca

SEQ ID NO: 4179 - DNA, 36 bp, synthetic construct; identical to SEQ ID NO: 2056
  misc_feature 1..36: note = Synthetic oligonucleotide
  source 1..36: mol_type = other DNA

SEQ ID NO: 4180 - DNA, 36 bp, synthetic construct
  misc_feature 1..36: note = Synthetic oligonucleotide
  source 1..36: mol_type = other DNA
aacccaattcacataaactctcaccctcactaaaca

SEQ ID NO: 4181 - DNA, 36 bp, synthetic construct
  misc_feature 1..36: note = Synthetic oligonucleotide
  source 1..36: mol_type = other DNA
aacccaatccacatacactctcaccctcactaaaca

SEQ ID NO: 4182 - DNA, 36 bp, synthetic construct
  misc_feature 1..36: note = Synthetic oligonucleotide
  source 1..36: mol_type = other DNA
aacccaattcacatacactctcaccctcactaaacc

SEQ ID NO: 4183 - DNA, 36 bp, synthetic construct
  misc_feature 1..36: note = Synthetic oligonucleotide
  source 1..36: mol_type = other DNA
aacccaattcacatacgctctcaccctcactaaaca

SEQ ID NO: 4184 - DNA, 36 bp, synthetic construct
  misc_feature 1..36: note = Synthetic oligonucleotide
  source 1..36: mol_type = other DNA
aacccaattcacatacactctctccctcactaaaaa

SEQ ID NO: 4185 - DNA, 36 bp, synthetic construct
  misc_feature 1..36: note = Synthetic oligonucleotide
  source 1..36: mol_type = other DNA
aacccaattcacataccctctcaccctcactaaaca

SEQ ID NO: 4186 - DNA, 36 bp, synthetic construct
  misc_feature 1..36: note = Synthetic oligonucleotide
  source 1..36: mol_type = other DNA
aacccaattcacatacactctcgccctcactaaaaa

SEQ ID NO: 4187 - DNA, 36 bp, synthetic construct
  misc_feature 1..36: note = Synthetic oligonucleotide
  source 1..36: mol_type = other DNA
aacccaattcacatacactcttaccctcactaaaca

SEQ ID NO: 4188 - DNA, 36 bp, synthetic construct
  misc_feature 1..36: note = Synthetic oligonucleotide
  source 1..36: mol_type = other DNA
aacccaatacacatacactctcaccctcactaaaca

SEQ ID NO: 4189 - DNA, 36 bp, synthetic construct
  misc_feature 1..36: note = Synthetic oligonucleotide
  source 1..36: mol_type = other DNA
aacccaattcacatacactctcaccctctctaaaca

SEQ ID NO: 4190 - DNA, 36 bp, synthetic construct
  misc_feature 1..36: note = Synthetic oligonucleotide
  source 1..36: mol_type = other DNA
aacccaattcacatacactctccccctcactaaaaa

SEQ ID NO: 4191 - DNA, 36 bp, synthetic construct
  misc_feature 1..36: note = Synthetic oligonucleotide
  source 1..36: mol_type = other DNA
aacccaattcacataccctctcaccctcactaaaaa

SEQ ID NO: 4192 - DNA, 36 bp, synthetic construct
  misc_feature 1..36: note = Synthetic oligonucleotide
  source 1..36: mol_type = other DNA
aacccaattcacatacactctcaccctcactaaact

SEQ ID NO: 4193 - DNA, 36 bp, synthetic construct
  misc_feature 1..36: note = Synthetic oligonucleotide
  source 1..36: mol_type = other DNA
aacccaattcacatacaccctcaccctcactaaaca

SEQ ID NO: 4194 - DNA, 36 bp, synthetic construct
  misc_feature 1..36: note = Synthetic oligonucleotide
  source 1..36: mol_type = other DNA
aacccaattcacatactctctcaccctcactaaaaa

SEQ ID NO: 4195 - DNA, 36 bp, synthetic construct
  misc_feature 1..36: note = Synthetic oligonucleotide
  source 1..36: mol_type = other DNA
aacccaatgcacatacactctcaccctcactaaaca

SEQ ID NO: 4196 - DNA, 36 bp, synthetic construct
  misc_feature 1..36: note = Synthetic oligonucleotide
  source 1..36: mol_type = other DNA
agcccaattcacatacactctcaccctcactaaaca

SEQ ID NO: 4197 - DNA, 36 bp, synthetic construct
  misc_feature 1..36: note = Synthetic oligonucleotide
  source 1..36: mol_type = other DNA
aacccaattcacatacactctaaccctcactaaaca

SEQ ID NO: 4198 - DNA, 36 bp, synthetic construct
  misc_feature 1..36: note = Synthetic oligonucleotide
  source 1..36: mol_type = other DNA
aacccaaatcacatacactctcaccctcactaaaca

SEQ ID NO: 4199 - DNA, 36 bp, synthetic construct
  misc_feature 1..36: note = Synthetic oligonucleotide
  source 1..36: mol_type = other DNA
aacccaattcacatacactctcaccctcactaaaat

SEQ ID NO: 4200 - DNA, 36 bp, synthetic construct
  misc_feature 1..36: note = Synthetic oligonucleotide
  source 1..36: mol_type = other DNA
aacccaattcacatacactctctccctcactaaaga

SEQ ID NO: 4201 - DNA, 36 bp, synthetic construct
  misc_feature 1..36: note = Synthetic oligonucleotide
  source 1..36: mol_type = other DNA
aacccaattctcatacactctcaccctcactaaaca

SEQ ID NO: 4202 - DNA, 36 bp, synthetic construct; identical to SEQ ID NO: 1884
  misc_feature 1..36: note = Synthetic oligonucleotide
  source 1..36: mol_type = other DNA

SEQ ID NO: 4203 - DNA, 36 bp, synthetic construct
  misc_feature 1..36: note = Synthetic oligonucleotide
  source 1..36: mol_type = other DNA
aacccaactcacatacactctcaccctcactaaaca

SEQ ID NO: 4204 - DNA, 36 bp, synthetic construct
  misc_feature 1..36: note = Synthetic oligonucleotide
  source 1..36: mol_type = other DNA
aacccaattcacatacactctcaccctcactaaaac

SEQ ID NO: 4205 - DNA, 36 bp, synthetic construct
  misc_feature 1..36: note = Synthetic oligonucleotide
  source 1..36: mol_type = other DNA
aacccaattcacatacactctcaccctcactaacta

SEQ ID NO: 4206 - DNA, 36 bp, synthetic construct
  misc_feature 1..36: note = Synthetic oligonucleotide
  source 1..36: mol_type = other DNA
aacccaattcacatacactctcgccctcactaaaga

SEQ ID NO: 4207 - DNA, 36 bp, synthetic construct
  misc_feature 1..36: note = Synthetic oligonucleotide
  source 1..36: mol_type = other DNA
aacccaattcacattcactctcaccctcactaaaca

SEQ ID NO: 4208 - DNA, 36 bp, synthetic construct
  misc_feature 1..36: note = Synthetic oligonucleotide
  source 1..36: mol_type = other DNA
aaccaaattcacatacactctcaccctcactaaaca

SEQ ID NO: 4209 - DNA, 36 bp, synthetic construct
  misc_feature 1..36: note = Synthetic oligonucleotide
  source 1..36: mol_type = other DNA
aacccaattcacataaactctcaccctcactaaaaa

SEQ ID NO: 4210 - DNA, 36 bp, synthetic construct
  misc_feature 1..36: note = Synthetic oligonucleotide
  source 1..36: mol_type = other DNA
aacccaattcacatacacgctcaccctcactaaaca

SEQ ID NO: 4211 - DNA, 36 bp, synthetic construct
  misc_feature 1..36: note = Synthetic oligonucleotide
  source 1..36: mol_type = other DNA
aacccaattcacatacactctcacactcactaaaca

SEQ ID NO: 4212 - DNA, 36 bp, synthetic construct
  misc_feature 1..36: note = Synthetic oligonucleotide
  source 1..36: mol_type = other DNA
aacccaattcacatacactctcaccatcactaaaca

SEQ ID NO: 4213 - DNA, 36 bp, synthetic construct
  misc_feature 1..36: note = Synthetic oligonucleotide
  source 1..36: mol_type = other DNA
aacccaattcacatacactctcaccctcactaacga

SEQ ID NO: 4214 - DNA, 36 bp, synthetic construct
  misc_feature 1..36: note = Synthetic oligonucleotide
  source 1..36: mol_type = other DNA
aacccaattcacatacactctcaccctcgctaaaca

SEQ ID NO: 4215 - DNA, 36 bp, synthetic construct
  misc_feature 1..36: note = Synthetic oligonucleotide
  source 1..36: mol_type = other DNA
aacccaattcacatacactctccccctcactaaaga

SEQ ID NO: 4216 - DNA, 36 bp, synthetic construct
  misc_feature 1..36: note = Synthetic oligonucleotide
  source 1..36: mol_type = other DNA
aacccaattcgcatacactctcaccctcactaaaca

SEQ ID NO: 4217 - DNA, 36 bp, synthetic construct
  misc_feature 1..36: note = Synthetic oligonucleotide
  source 1..36: mol_type = other DNA
aacccaattcacatacactcacaccctcactaaaca

SEQ ID NO: 4218 - DNA, 36 bp, synthetic construct
  misc_feature 1..36: note = Synthetic oligonucleotide
  source 1..36: mol_type = other DNA
aacccaattcacatacactcccaccctcactaaaca

SEQ ID NO: 4219 - DNA, 36 bp, synthetic construct
  misc_feature 1..36: note = Synthetic oligonucleotide
  source 1..36: mol_type = other DNA
aacccaattcacatacactctcaccctcactaaacg

SEQ ID NO: 4220 - DNA, 36 bp, synthetic construct
  misc_feature 1..36: note = Synthetic oligonucleotide
  source 1..36: mol_type = other DNA
aacccaattcacatactctctcaccctcactaaaga

SEQ ID NO: 4221 - DNA, 36 bp, synthetic construct
  misc_feature 1..36: note = Synthetic oligonucleotide
  source 1..36: mol_type = other DNA
aacccaattcacatactctctcaccctcactaaata

SEQ ID NO: 4222 - DNA, 36 bp, synthetic construct
  misc_feature 1..36: note = Synthetic oligonucleotide
  source 1..36: mol_type = other DNA
aacccagttcacatacactctcaccctcactaaaca

SEQ ID NO: 4223 - DNA, 36 bp, synthetic construct
  misc_feature 1..36: note = Synthetic oligonucleotide
  source 1..36: mol_type = other DNA
aaaccaattcacatacactctcaccctcactaaaca

SEQ ID NO: 4224 - DNA, 36 bp, synthetic construct
  misc_feature 1..36: note = Synthetic oligonucleotide
  source 1..36: mol_type = other DNA
aacacaattcacatacactctcaccctcactaaaca

SEQ ID NO: 4225 - DNA, 36 bp, synthetic construct
  misc_feature 1..36: note = Synthetic oligonucleotide
  source 1..36: mol_type = other DNA
aacccaactcacatacactctcaccctcactaaaaa

SEQ ID NO: 4226 - DNA, 36 bp, synthetic construct
  misc_feature 1..36: note = Synthetic oligonucleotide
  source 1..36: mol_type = other DNA
aacccaagtcacatacactctcaccctcactaaaca

SEQ ID NO: 4227 - DNA, 36 bp, synthetic construct
  misc_feature 1..36: note = Synthetic oligonucleotide
  source 1..36: mol_type = other DNA
aacccaatccacatacactctcaccctcactaaaaa

SEQ ID NO: 4228 - DNA, 36 bp, synthetic construct
  misc_feature 1..36: note = Synthetic oligonucleotide
  source 1..36: mol_type = other DNA
aacccaattaacatacactctcaccctcactaaaca

SEQ ID NO: 4229 - DNA, 36 bp, synthetic construct
  misc_feature 1..36: note = Synthetic oligonucleotide
  source 1..36: mol_type = other DNA
aacccaattcacaaacactctcaccctcactaaaca

SEQ ID NO: 4230 - DNA, 36 bp, synthetic construct
  misc_feature 1..36: note = Synthetic oligonucleotide
  source 1..36: mol_type = other DNA
aacccaattcacacacactctcacccccactaaaca

SEQ ID NO: 4231 - DNA, 36 bp, synthetic construct
  misc_feature 1..36: note = Synthetic oligonucleotide
  source 1..36: mol_type = other DNA
aacccaattcacacacactctcaccctcactaaaca

SEQ ID NO: 4232 - DNA, 36 bp, synthetic construct
  misc_feature 1..36: note = Synthetic oligonucleotide
  source 1..36: mol_type = other DNA
aacccaattcacacacactctccccctcactaaaca

SEQ ID NO: 4233 - DNA, 36 bp, synthetic construct
  misc_feature 1..36: note = Synthetic oligonucleotide
  source 1..36: mol_type = other DNA
aacccaattcacagacactctcaccctcactaaaca

SEQ ID NO: 4234 - DNA, 36 bp, synthetic construct
  misc_feature 1..36: note = Synthetic oligonucleotide
  source 1..36: mol_type = other DNA
aacccaattcacatacaatctcaccctcactaaaca

SEQ ID NO: 4235 - DNA, 36 bp, synthetic construct
  misc_feature 1..36: note = Synthetic oligonucleotide
  source 1..36: mol_type = other DNA
aacccaattcacatacacactcaccctcactaaaca

SEQ ID NO: 4236 - DNA, 36 bp, synthetic construct
  misc_feature 1..36: note = Synthetic oligonucleotide
  source 1..36: mol_type = other DNA
aacccaattcacatacaccctcaccctcactaaaaa

SEQ ID NO: 4237 - DNA, 36 bp, synthetic construct
  misc_feature 1..36: note = Synthetic oligonucleotide
  source 1..36: mol_type = other DNA
aacccaattcacatacactatcaccctcactaaaaa

SEQ ID NO: 4238 - DNA, 36 bp, synthetic construct
  misc_feature 1..36: note = Synthetic oligonucleotide
  source 1..36: mol_type = other DNA
aacccaattcacatacactatcaccctcactaaaca

SEQ ID NO: 4239 - DNA, 36 bp, synthetic construct
  misc_feature 1..36: note = Synthetic oligonucleotide
  source 1..36: mol_type = other DNA
aacccaattcacatacactcccaccctcactaaaaa

SEQ ID NO: 4240 - DNA, 36 bp, synthetic construct
  misc_feature 1..36: note = Synthetic oligonucleotide
  source 1..36: mol_type = other DNA
aacccaattcacatacactcgcaccctcactaaaca

SEQ ID NO: 4241 - DNA, 36 bp, synthetic construct
  misc_feature 1..36: note = Synthetic oligonucleotide
  source 1..36: mol_type = other DNA
aacccaattcacatacactctcaacctcactaaaca

SEQ ID NO: 4242 - DNA, 36 bp, synthetic construct
  misc_feature 1..36: note = Synthetic oligonucleotide
  source 1..36: mol_type = other DNA
aacccaattcacatacactctcacactcactaaaaa

SEQ ID NO: 4243 - DNA, 36 bp, synthetic construct
  misc_feature 1..36: note = Synthetic oligonucleotide
  source 1..36: mol_type = other DNA
aacccaattcacatacactctcaccatccctaaaca

SEQ ID NO: 4244 - DNA, 36 bp, synthetic construct; identical to SEQ ID NO: 2360
  misc_feature 1..36: note = Synthetic oligonucleotide
  source 1..36: mol_type = other DNA

SEQ ID NO: 4245 - DNA, 36 bp, synthetic construct
  misc_feature 1..36: note = Synthetic oligonucleotide
  source 1..36: mol_type = other DNA
aacccaattcacatacactctcacccgcactaaaca

SEQ ID NO: 4246 - DNA, 36 bp, synthetic construct
  misc_feature 1..36: note = Synthetic oligonucleotide
  source 1..36: mol_type = other DNA
aacccaattcacatacactctcaccctaactaaaca

SEQ ID NO: 4247 - DNA, 36 bp, synthetic construct
  misc_feature 1..36: note = Synthetic oligonucleotide
  source 1..36: mol_type = other DNA
aacccaattcacatacactctcaccctcaataaaca

SEQ ID NO: 4248 - DNA, 36 bp, synthetic construct
  misc_feature 1..36: note = Synthetic oligonucleotide
  source 1..36: mol_type = other DNA
aacccaattcacatacactctcaccctcaccaaaca

SEQ ID NO: 4249 - DNA, 36 bp, synthetic construct
  misc_feature 1..36: note = Synthetic oligonucleotide
  source 1..36: mol_type = other DNA
aacccaattcacatacactctcaccctcactaaaag

SEQ ID NO: 4250 - DNA, 36 bp, synthetic construct
  misc_feature 1..36: note = Synthetic oligonucleotide
  source 1..36: mol_type = other DNA
aacccaattcacatacactctcaccctcactaaagc

SEQ ID NO: 4251 - DNA, 36 bp, synthetic construct
  misc_feature 1..36: note = Synthetic oligonucleotide
  source 1..36: mol_type = other DNA
aacccaattcacatacactctcaccctcactaaagt

SEQ ID NO: 4252 - DNA, 36 bp, synthetic construct
  misc_feature 1..36: note = Synthetic oligonucleotide
  source 1..36: mol_type = other DNA
aacccaattcacatacactctcaccctcactaaatc

SEQ ID NO: 4253 - DNA, 36 bp, synthetic construct
  misc_feature 1..36: note = Synthetic oligonucleotide
  source 1..36: mol_type = other DNA
aacccaattcacatacactctcaccctcactaaatt

SEQ ID NO: 4254 - DNA, 36 bp, synthetic construct
  misc_feature 1..36: note = Synthetic oligonucleotide
  source 1..36: mol_type = other DNA
aacccaattcacatacactctcaccctcactaagaa

SEQ ID NO: 4255 - DNA, 36 bp, synthetic construct
  misc_feature 1..36: note = Synthetic oligonucleotide
  source 1..36: mol_type = other DNA
aacccaattcacatacactctcaccctcactaagca

SEQ ID NO: 4256 - DNA, 36 bp, synthetic construct
  misc_feature 1..36: note = Synthetic oligonucleotide
  source 1..36: mol_type = other DNA
aacccaattcacatacactctcaccctcactaagga

SEQ ID NO: 4257 - DNA, 36 bp, synthetic construct
  misc_feature 1..36: note = Synthetic oligonucleotide
  source 1..36: mol_type = other DNA
aacccaattcacatacactctcaccctcactaagta

SEQ ID NO: 4258 - DNA, 36 bp, synthetic construct
  misc_feature 1..36: note = Synthetic oligonucleotide
  source 1..36: mol_type = other DNA
aacccaattcacatacactctcaccctcactaataa

SEQ ID NO: 4259 - DNA, 36 bp, synthetic construct
  misc_feature 1..36: note = Synthetic oligonucleotide
  source 1..36: mol_type = other DNA
aacccaattcacatacactctcaccctcactaatca

SEQ ID NO: 4260 - DNA, 36 bp, synthetic construct
  misc_feature 1..36: note = Synthetic oligonucleotide
  source 1..36: mol_type = other DNA
aacccaattcacatacactctcaccctcactaatga

SEQ ID NO: 4261 - DNA, 36 bp, synthetic construct
  misc_feature 1..36: note = Synthetic oligonucleotide
  source 1..36: mol_type = other DNA
aacccaattcacatacactctcaccctcactaatta

SEQ ID NO: 4262 - DNA, 36 bp, synthetic construct
  misc_feature 1..36: note = Synthetic oligonucleotide
  source 1..36: mol_type = other DNA
aacccaattcacatacactctcaccctcactacaca

SEQ ID NO: 4263 - DNA, 36 bp, synthetic construct
  misc_feature 1..36: note = Synthetic oligonucleotide
  source 1..36: mol_type = other DNA
aacccaattcacatacactctcaccctcactagaca

SEQ ID NO: 4264 - DNA, 36 bp, synthetic construct
  misc_feature 1..36: note = Synthetic oligonucleotide
  source 1..36: mol_type = other DNA
aacccaattcacatacactctcaccctcactataca

SEQ ID NO: 4265 - DNA, 36 bp, synthetic construct
  misc_feature 1..36: note = Synthetic oligonucleotide
  source 1..36: mol_type = other DNA
aacccaattcacatacactctcaccctcactcaaca

SEQ ID NO: 4266 - DNA, 36 bp, synthetic construct
  misc_feature 1..36: note = Synthetic oligonucleotide
  source 1..36: mol_type = other DNA
aacccaattcacatacactctcaccctcactgaaca

SEQ ID NO: 4267 - DNA, 36 bp, synthetic construct
  misc_feature 1..36: note = Synthetic oligonucleotide
  source 1..36: mol_type = other DNA
aacccaattcacatacactctcaccctcacttaaca

SEQ ID NO: 4268 - DNA, 36 bp, synthetic construct
  misc_feature 1..36: note = Synthetic oligonucleotide
  source 1..36: mol_type = other DNA
aacccaattcacatacactctcaccctcattaaaca

SEQ ID NO: 4269 - DNA, 36 bp, synthetic construct
  misc_feature 1..36: note = Synthetic oligonucleotide
  source 1..36: mol_type = other DNA
aacccaattcacatacactctcaccctccctaaaaa

SEQ ID NO: 4270 - DNA, 36 bp, synthetic construct
  misc_feature 1..36: note = Synthetic oligonucleotide
  source 1..36: mol_type = other DNA
aacccaattcacatacactctcaccctccctaaaca

SEQ ID NO: 4271 - DNA, 36 bp, synthetic construct
  misc_feature 1..36: note = Synthetic oligonucleotide
  source 1..36: mol_type = other DNA
aacccaattcacatacactctcaccctccctaaaga

SEQ ID NO: 4272 - DNA, 36 bp, synthetic construct
  misc_feature 1..36: note = Synthetic oligonucleotide
  source 1..36: mol_type = other DNA
aacccaattcacatacactctcaccctccctaaata

SEQ ID NO: 4273 - DNA, 36 bp, synthetic construct
  misc_feature 1..36: note = Synthetic oligonucleotide
  source 1..36: mol_type = other DNA
aacccaattcacatacactctcaccctcgctaaaaa

SEQ ID NO: 4274 - DNA, 36 bp, synthetic construct
  misc_feature 1..36: note = Synthetic oligonucleotide
  source 1..36: mol_type = other DNA
aacccaattcacatacactctcaccctctctaaaaa

SEQ ID NO: 4275 - DNA, 36 bp, synthetic construct
  misc_feature 1..36: note = Synthetic oligonucleotide
  source 1..36: mol_type = other DNA
aacccaattcacatacactctcaccctgactaaaca

SEQ ID NO: 4276 - DNA, 36 bp, synthetic construct
  misc_feature 1..36: note = Synthetic oligonucleotide
  source 1..36: mol_type = other DNA
aacccaattcacatacactctcacccttactaaaca

SEQ ID NO: 4277 - DNA, 36 bp, synthetic construct
  misc_feature 1..36: note = Synthetic oligonucleotide
  source 1..36: mol_type = other DNA
aacccaattcacatacactctcaccttcactaaaca

SEQ ID NO: 4278 - DNA, 36 bp, synthetic construct
  misc_feature 1..36: note = Synthetic oligonucleotide
  source 1..36: mol_type = other DNA
aacccaattcacatacactctcaccttctctaaaca

SEQ ID NO: 4279 - DNA, 36 bp, synthetic construct
  misc_feature 1..36: note = Synthetic oligonucleotide
  source 1..36: mol_type = other DNA
aacccaattcacatacactctcacgctcactaaaca

SEQ ID NO: 4280 - DNA, 36 bp, synthetic construct
  misc_feature 1..36: note = Synthetic oligonucleotide
  source 1..36: mol_type = other DNA
aacccaattcacatacactctcactctcactaaaaa

SEQ ID NO: 4281 - DNA, 36 bp, synthetic construct
  misc_feature 1..36: note = Synthetic oligonucleotide
  source 1..36: mol_type = other DNA
aacccaattcacatacactctcactctcactaaaca

SEQ ID NO: 4282 - DNA, 36 bp, synthetic construct
  misc_feature 1..36: note = Synthetic oligonucleotide
  source 1..36: mol_type = other DNA
aacccaattcacatacactctcagcctcactaaaca

SEQ ID NO: 4283 - DNA, 36 bp, synthetic construct
  misc_feature 1..36: note = Synthetic oligonucleotide
  source 1..36: mol_type = other DNA
aacccaattcacatacactctcatcctcactaaaca

SEQ ID NO: 4284 - DNA, 36 bp, synthetic construct
  misc_feature 1..36: note = Synthetic oligonucleotide
  source 1..36: mol_type = other DNA
aacccaattcacatacactctccccctcactaaata

SEQ ID NO: 4285 - DNA, 36 bp, synthetic construct
  misc_feature 1..36: note = Synthetic oligonucleotide
  source 1..36: mol_type = other DNA
aacccaattcacatacactctcgccctcactaaata

SEQ ID NO: 4286 - DNA, 36 bp, synthetic construct
  misc_feature 1..36: note = Synthetic oligonucleotide
  source 1..36: mol_type = other DNA
aacccaattcacatacactctctccctcactaaata

SEQ ID NO: 4287 - DNA, 36 bp, synthetic construct
  misc_feature 1..36: note = Synthetic oligonucleotide
  source 1..36: mol_type = other DNA
aacccaattcacatacactgtcaccctcactaaaca

SEQ ID NO: 4288 - DNA, 36 bp, synthetic construct
  misc_feature 1..36: note = Synthetic oligonucleotide
  source 1..36: mol_type = other DNA
aacccaattcacatacactttcaccctcactaaaca

SEQ ID NO: 4289 - DNA, 36 bp, synthetic construct
  misc_feature 1..36: note = Synthetic oligonucleotide
  source 1..36: mol_type = other DNA
aacccaattcacatacattctcaccctcactaaaca

SEQ ID NO: 4290 - DNA, 36 bp, synthetic construct
  misc_feature 1..36: note = Synthetic oligonucleotide
  source 1..36: mol_type = other DNA
aacccaattcacataccctctcaccctcactaaaga

SEQ ID NO: 4291 - DNA, 36 bp, synthetic construct
  misc_feature 1..36: note = Synthetic oligonucleotide
  source 1..36: mol_type = other DNA
aacccaattcacatacgctctcaccctcactaaaaa

SEQ ID NO: 4292 - DNA, 36 bp, synthetic construct
  misc_feature 1..36: note = Synthetic oligonucleotide
  source 1..36: mol_type = other DNA
aacccaattcacatacgctctcaccctcactaaaga

SEQ ID NO: 4293 - DNA, 36 bp, synthetic construct
  misc_feature 1..36: note = Synthetic oligonucleotide
  source 1..36: mol_type = other DNA
aacccaattcacatatactctcaccctcactaaaaa

SEQ ID NO: 4294 - DNA, 36 bp, synthetic construct
  misc_feature 1..36: note = Synthetic oligonucleotide
  source 1..36: mol_type = other DNA
aacccaattcacatatactctcaccctcactaaaca

SEQ ID NO: 4295 - DNA, 36 bp, synthetic construct
  misc_feature 1..36: note = Synthetic oligonucleotide
  source 1..36: mol_type = other DNA
aacccaattcacatccactctcaccctcactaaaca

SEQ ID NO: 4296 - DNA, 36 bp, synthetic construct
  misc_feature 1..36: note = Synthetic oligonucleotide
  source 1..36: mol_type = other DNA
aacccaattcacatgcactctcaccctcactaaaca

SEQ ID NO: 4297 - DNA, 36 bp, synthetic construct
  misc_feature 1..36: note = Synthetic oligonucleotide
  source 1..36: mol_type = other DNA
aacccaattcacctacactctcaccctcactaaaaa

SEQ ID NO: 4298 - DNA, 36 bp, synthetic construct
  misc_feature 1..36: note = Synthetic oligonucleotide
  source 1..36: mol_type = other DNA
aacccaattcacctacactctcaccctcactaaaca

SEQ ID NO: 4299 - DNA, 36 bp, synthetic construct
  misc_feature 1..36: note = Synthetic oligonucleotide
  source 1..36: mol_type = other DNA
aacccaattcacgtacactctcaccctcactaaaca

SEQ ID NO: 4300 - DNA, 36 bp, synthetic construct
  misc_feature 1..36: note = Synthetic oligonucleotide
  source 1..36: mol_type = other DNA
aacccaattcacttacactctcaccctcactaaaca

SEQ ID NO: 4301 - DNA, 36 bp, synthetic construct
  misc_feature 1..36: note = Synthetic oligonucleotide
  source 1..36: mol_type = other DNA
aacccaattcagatacactctcaccctcactaaaca

SEQ ID NO: 4302 - DNA, 36 bp, synthetic construct
  misc_feature 1..36: note = Synthetic oligonucleotide
  source 1..36: mol_type = other DNA
aacccaattcatatacactctcaccctcactaaaaa

SEQ ID NO: 4303 - DNA, 36 bp, synthetic construct
  misc_feature 1..36: note = Synthetic oligonucleotide
  source 1..36: mol_type = other DNA
aacccaattcatatacactctcaccctcactaaaca

SEQ ID NO: 4304 - DNA, 36 bp, synthetic construct
  misc_feature 1..36: note = Synthetic oligonucleotide
  source 1..36: mol_type = other DNA
aacccaattcccatacactctcaccctcactaaaca

SEQ ID NO: 4305 - DNA, 36 bp, synthetic construct
  misc_feature 1..36: note = Synthetic oligonucleotide
  source 1..36: mol_type = other DNA
aacccaatttacatacactctcaccctcactaaaca

SEQ ID NO: 4306 - DNA, 36 bp, synthetic construct
  misc_feature 1..36: note = Synthetic oligonucleotide
  source 1..36: mol_type = other DNA
aacccacttcacatacactctcaccctcactaaaca

SEQ ID NO: 4307 - DNA, 36 bp, synthetic construct
  misc_feature 1..36: note = Synthetic oligonucleotide
  source 1..36: mol_type = other DNA
aacccatttcacatacactctcaccctcactaaaca

SEQ ID NO: 4308 - DNA, 36 bp, synthetic construct
  misc_feature 1..36: note = Synthetic oligonucleotide
  source 1..36: mol_type = other DNA
aaccccattcacatacactctcaccctcactaaaaa

SEQ ID NO: 4309 - DNA, 36 bp, synthetic construct
  misc_feature 1..36: note = Synthetic oligonucleotide
  source 1..36: mol_type = other DNA
aaccccattcacatacactctcaccctcactaaaca

SEQ ID NO: 4310 - DNA, 36 bp, synthetic construct
  misc_feature 1..36: note = Synthetic oligonucleotide
  source 1..36: mol_type = other DNA
aacccgattcacatacactctcaccctcactaaaca

SEQ ID NO: 4311 - DNA, 36 bp, synthetic construct
  misc_feature 1..36: note = Synthetic oligonucleotide
  source 1..36: mol_type = other DNA
aaccctattcacatacactctcaccctcactaaaaa

SEQ ID NO: 4312 - DNA, 36 bp, synthetic construct
  misc_feature 1..36: note = Synthetic oligonucleotide
  source 1..36: mol_type = other DNA
aaccctattcacatacactctcaccctcactaaaca

SEQ ID NO: 4313 - DNA, 36 bp, synthetic construct
  misc_feature 1..36: note = Synthetic oligonucleotide
  source 1..36: mol_type = other DNA
aaccgaattcacatacactctcaccctcactaaaca

SEQ ID NO: 4314 - DNA, 36 bp, synthetic construct
  misc_feature 1..36: note = Synthetic oligonucleotide
  source 1..36: mol_type = other DNA
aacctaattcacatacactctcaccctcactaaaaa

SEQ ID NO: 4315 - DNA, 36 bp, synthetic construct
  misc_feature 1..36: note = Synthetic oligonucleotide
  source 1..36: mol_type = other DNA
aacctaattcacatacactctcaccctcactaaaca

SEQ ID NO: 4316 - DNA, 36 bp, synthetic construct
  misc_feature 1..36: note = Synthetic oligonucleotide
  source 1..36: mol_type = other DNA
aactcaattcacatacactctcaccctcactaaaca

SEQ ID NO: 4317 - DNA, 36 bp, synthetic construct
  misc_feature 1..36: note = Synthetic oligonucleotide
  source 1..36: mol_type = other DNA
aatccaattcacatacactctcaccctcactaaaca

SEQ ID NO: 4318 - DNA, 36 bp, synthetic construct
  misc_feature 1..36: note = Synthetic oligonucleotide
  source 1..36: mol_type = other DNA
accccaattcacatacactctcaccctcactaaaaa

SEQ ID NO: 4319 - DNA, 36 bp, synthetic construct
  misc_feature 1..36: note = Synthetic oligonucleotide
  source 1..36: mol_type = other DNA
accccaattcacatacactctcaccctcactaaaca

SEQ ID NO: 4320 - DNA, 36 bp, synthetic construct
  misc_feature 1..36: note = Synthetic oligonucleotide
  source 1..36: mol_type = other DNA
agcccaattcacatacactctcaccctcactaaaaa

SEQ ID NO: 4321 - DNA, 36 bp, synthetic construct
  misc_feature 1..36: note = Synthetic oligonucleotide
  source 1..36: mol_type = other DNA
atcccaattcacatacactctcaccctcactaaaaa

SEQ ID NO: 4322 - DNA, 36 bp, synthetic construct
  misc_feature 1..36: note = Synthetic oligonucleotide
  source 1..36: mol_type = other DNA
cacccaattcacatacactctcaccctcactaaaaa

SEQ ID NO: 4323 - DNA, 36 bp, synthetic construct
  misc_feature 1..36: note = Synthetic oligonucleotide
  source 1..36: mol_type = other DNA
cacccaattcacatacactctcaccctcactaaaca

SEQ ID NO: 4324 - DNA, 36 bp, synthetic construct
  misc_feature 1..36: note = Synthetic oligonucleotide
  source 1..36: mol_type = other DNA
gacccaattcacatacactctcaccctcactaaaca

SEQ ID NO: 4325 - DNA, 36 bp, synthetic construct
  misc_feature 1..36: note = Synthetic oligonucleotide
  source 1..36: mol_type = other DNA
tacccaattcacatacactctcaccctcactaaaca

SEQ ID NO: 4326 - DNA, 39 bp, synthetic construct
  misc_feature 1..39: note = Synthetic oligonucleotide
  source 1..39: mol_type = other DNA
ttaagatagttgatttaaagcggtggattgttctatagt

SEQ ID NO: 4327 - DNA, 39 bp, synthetic construct
  misc_feature 1..39: note = Synthetic oligonucleotide
  source 1..39: mol_type = other DNA
tactatagatggattgtccgctttaaatcaactatctta

SEQ ID NO: 4328 - DNA, 91 bp, synthetic construct
  misc_feature 1..91: note = Synthetic oligonucleotide
  source 1..91: mol_type = other DNA
ctagcatgactgcagtacgtactatagaacaatccaccgctttaaatcaactatcttactgtctcttatacacatctgacgctgccgacga

SEQ ID NO: 4329 - DNA, 46 bp, synthetic construct
  misc_feature 1..46: note = Synthetic oligonucleotide
  source 1..46: mol_type = other DNA
acgtactatagaacaatccaccgctttaaatcaactatcttactgt

SEQ ID NO: 4330 - DNA, 41 bp, synthetic construct
  misc_feature 1..41: note = Synthetic oligonucleotide
  source 1..41: mol_type = other DNA
gtactatagaacaatccaccgctttaaatcaactatcttac

SEQ ID NO: 4331 - DNA, 91 bp, synthetic construct
  misc_feature 1..91: note = Synthetic oligonucleotide
  source 1..91: mol_type = other DNA
ctagcatgactgcagtacgtacgatagaacaatccaccgctttaaatcaactatcttactgtctcttatacacatctgacgctgccgacga

SEQ ID NO: 4332 - DNA, 46 bp, synthetic construct
  misc_feature 1..46: note = Synthetic oligonucleotide
  source 1..46: mol_type = other DNA
acgtacgatagaacaatccaccgctttaaatcaactatcttactgt

SEQ ID NO: 4333 - DNA, 91 bp, synthetic construct
  misc_feature 1..91: note = Synthetic oligonucleotide
  source 1..91: mol_type = other DNA
ctagcatgactgcagtacgtactatagaacaatccaccgctttaaatcaactatctgactgtctcttatacacatctgacgctgccgacga

SEQ ID NO: 4334 - DNA, 53 bp, synthetic construct
  misc_feature 1..53: note = Synthetic oligonucleotide
  source 1..53: mol_type = other DNA
atagaacaatccaccgctttaaatcaactatctgactgtctcttatacacatc

SEQ ID NO: 4335 - DNA, 89 bp, synthetic construct
  misc_feature 1..89: note = Synthetic oligonucleotide
  source 1..89: mol_type = other DNA
ctagcatgactgcagtacgtaacccaattcacatacactctcacccccactaaacactgtctcttatacacatctgacgctgccgacga

SEQ ID NO: 4336 - DNA, 89 bp, synthetic construct
  misc_feature 1..89: note = Synthetic oligonucleotide
  source 1..89: mol_type = other DNA
ctagcatgactgcagtacgtaacccaattcacatacactctcaccctcactaaacactgtctcttatacacatctgacgctgccgacga

SEQ ID NO: 4337 - DNA, 18 bp, synthetic construct
  misc_feature 1..18: note = Synthetic oligonucleotide
  source 1..18: mol_type = other DNA
gtaacccaattcacatac

SEQ ID NO: 4338 - DNA, 20 bp, synthetic construct
  misc_feature 1..20: note = Synthetic oligonucleotide
  source 1..20: mol_type = other DNA
ggtaacccaattcacatacc

SEQ ID NO: 4339 - DNA, 91 bp, synthetic construct
  misc_feature 1..91: note = Synthetic oligonucleotide
  source 1..91: mol_type = other DNA
ctagcatgactgcagtacgttaagatagttgatttaaagcggtggattgttctatagtctgtctcttatacacatctgacgctgccgacga

SEQ ID NO: 4340 - DNA, 91 bp, synthetic construct
  misc_feature 1..91: note = Synthetic oligonucleotide
  source 1..91: mol_type = other DNA
ctagcatgactgcagtacgttacccctgacaatcctcgcgccgaggcctccatcctgactgtctcttatacacatctgacgctgccgacga

SEQ ID NO: 4341 - DNA, 91 bp, synthetic construct
  misc_feature 1..91: note = Synthetic oligonucleotide
  source 1..91: mol_type = other DNA
ctagcatgactgcagtacgttacccctgacaatcctcgcgccgaggcctccatcctcactgtctcttatacacatctgacgctgccgacga

SEQ ID NO: 4342 - DNA, 89 bp, synthetic construct
  misc_feature 1..89: note = Synthetic oligonucleotide
  source 1..89: mol_type = other DNA
ctagcatgactgcagtacgtgattttaaaacccttgcacctgattgtgccaatccactgtctcttatacacatctgacgctgccgacga

SEQ ID NO: 4343 - protein, 13 aa, Homo sapiens
  SITE 7: note = Oxidation
PGRRGRPGLKGEQ

SEQ ID NO: 4344 - protein, 13 aa, Homo sapiens
  SITE 7: note = Galactosyl
RGRPGLKGEQGEP

SEQ ID NO: 4345 - protein, 13 aa, Homo sapiens
  SITE 7: note = Oxidation
RGRPGLKGEQGEP

SEQ ID NO: 4346 - protein, 13 aa, Homo sapiens
  SITE 7: note = Oxidation
QGEPGAPGIRTGI

SEQ ID NO: 4347 - protein, 13 aa, Homo sapiens
  SITE 7: note = Galactosyl
TGIQGLKGDQGEP

SEQ ID NO: 4348 - protein, 13 aa, Homo sapiens
  SITE 7: note = Oxidation
KGDQGEPGPSGNP

SEQ ID NO: 4349 - protein, 13 aa, Homo sapiens
  SITE 7: note = Oxidation
DQGEPGPSGNPGK

SEQ ID NO: 4350 - protein, 13 aa, Homo sapiens
  SITE 7: note = Oxidation
PGPSGNPGKVGYP

SEQ ID NO: 4351 - protein, 13 aa, Homo sapiens
  SITE 7: note = Galactosyl
PSGNPGKVGYPGP

SEQ ID NO: 4352 - protein, 13 aa, Homo sapiens
  SITE 7: note = Oxidation
PGKVGYPGPSGPL

SEQ ID NO: 4353 - protein, 13 aa, Homo sapiens
  SITE 7: note = Oxidation
KVGYPGPSGPLGA

SEQ ID NO: 4354 - protein, 13 aa, Homo sapiens
  SITE 7: note = Oxidation
KGTKGSPGNIKDQ

SEQ ID NO: 4355 - protein, 13 aa, Homo sapiens
  SITE 7: note = Oxidation
IRRNPPMGGNVVI

SEQ ID NO: 4356 - protein, 13 aa, Homo sapiens
  SITE 7: note = Oxidation
QVVSGGMVLQLQQ

SEQ ID NO: 4357 - DNA, 35 bp, synthetic construct
  source 1..35: mol_type = other DNA
catcctcttcttttcttggtgttgagaagatgctc

SEQ ID NO: 4358 - DNA, 35 bp, synthetic construct
  source 1..35: mol_type = other DNA
cacaattctgcgggttagcaggaaggttagggaac

SEQ ID NO: 4359 - DNA, 35 bp, synthetic construct
  source 1..35: mol_type = other DNA
ctgttgagattattgagcttcatcatgaccagaag

SEQ ID NO: 4360 - DNA, 35 bp, synthetic construct
  source 1..35: mol_type = other DNA
caaagacgcctatcttccagtttgatcgggaaact

SEQ ID NO: 4361 - DNA, 35 bp, synthetic construct
  source 1..35: mol_type = other DNA
cgaacctaactcctcgctacattcctattgttttc

SEQ ID NO: 4362 - DNA, 35 bp, synthetic construct
  source 1..35: mol_type = other DNA
ccaatttggttttactcccctcgattatgcggagt

SEQ ID NO: 4363 - DNA, 35 bp, synthetic construct
  source 1..35: mol_type = other DNA
ctttcgggttatatctatcatttacttgacaccct

SEQ ID NO: 4364 - DNA, 35 bp, synthetic construct
  source 1..35: mol_type = other DNA
caacagccactttttttccaaattttgcaagagcc

SEQ ID NO: 4365 - DNA, 35 bp, synthetic construct
  source 1..35: mol_type = other DNA
caccgtgtggacggcaactcagagataacgcatat

SEQ ID NO: 4366 - DNA, 35 bp, synthetic construct
  source 1..35: mol_type = other DNA
cctggagtttatgtattgccaacgagtttgtcttt

SEQ ID NO: 4367 - DNA, 35 bp, synthetic construct
  source 1..35: mol_type = other DNA
cagataaggttgttattgtggaggatgttactaca

SEQ ID NO: 4368 - DNA, 35 bp, synthetic construct
  source 1..35: mol_type = other DNA
cttccttcctgtgttccagctacaaacttagaaac

SEQ ID NO: 4369 - DNA, 35 bp, synthetic construct
  source 1..35: mol_type = other DNA
cataaaattggttttgcctttcagcaattcaactt

SEQ ID NO: 4370 - DNA, 35 bp, synthetic construct
  source 1..35: mol_type = other DNA
ctggtcaagacttgcatgaggacccgcaaattcct

SEQ ID NO: 4371 - DNA, 35 bp, synthetic construct
  source 1..35: mol_type = other DNA
ctttcgttgggacgcttgaagcgcaagtagaaaac

SEQ ID NO: 4372 - DNA, 35 bp, synthetic construct
  source 1..35: mol_type = other DNA
ccagcagacctgcaatatcaaagttataagcgcgt

SEQ ID NO: 4373 - DNA, 35 bp, synthetic construct
  source 1..35: mol_type = other DNA
cctgccaatgcactcgatcttgtcatttttttgcg

SEQ ID NO: 4374 - DNA, 35 bp, synthetic construct
  source 1..35: mol_type = other DNA
caaactggagagagaagtgaagacgatttaaccca

SEQ ID NO: 4375 - DNA, 35 bp, synthetic construct
  source 1..35: mol_type = other DNA
cgattgctgcattccgctcaacgcttgaggaagta

SEQ ID NO: 4376 - DNA, 35 bp, synthetic construct
  source 1..35: mol_type = other DNA
ctgaggctgttaaagctgtagcaactcttccacga

SEQ ID NO: 4377 - DNA, 35 bp, synthetic construct
  source 1..35: mol_type = other DNA
ctaggacgcaaatcacttgaagaagtgaaagcgag

SEQ ID NO: 4378 - DNA, 35 bp, synthetic construct
  source 1..35: mol_type = other DNA
ccacgcgatgacgttcgtcaagagtcgcataatct

SEQ ID NO: 4379 - DNA, 35 bp, synthetic construct
  source 1..35: mol_type = other DNA
catttggaatgatgtgtactgggaataagacgacg

SEQ ID NO: 4380 - DNA, 35 bp, synthetic construct
  source 1..35: mol_type = other DNA
cacaagaatccctgctagctgaaggagggtcaaac

SEQ ID NO: 4381 - DNA, 35 bp, synthetic construct
  source 1..35: mol_type = other DNA
cttgacgtagattgctatcaggttacgatgactgc

SEQ ID NO: 4382 - DNA, 35 bp, synthetic construct
  source 1..35: mol_type = other DNA
cttacagatcgtgtgctcatgacttccacagacgt

SEQ ID NO: 4383 - DNA, 35 bp, synthetic construct
  source 1..35: mol_type = other DNA
cttggaggagttgatagtggtaaaacaacattagc

SEQ ID NO: 4384 - DNA, 35 bp, synthetic construct
  source 1..35: mol_type = other DNA
cctacgtatatatccaagtggttatgtccgacggc

SEQ ID NO: 4385 - DNA, 35 bp, synthetic construct
  source 1..35: mol_type = other DNA
cagcaagaaggagtatggaacttatagcaagagag

SEQ ID NO: 4386 - DNA, 35 bp, synthetic construct
  source 1..35: mol_type = other DNA
cacccctccaaacgcattcttattggcaaatggaa

SEQ ID NO: 4387 - DNA, 35 bp, synthetic construct
  source 1..35: mol_type = other DNA
cccgaagcaatactgtcgtcactctgtatgtccgt

SEQ ID NO: 4388 - DNA, 35 bp, synthetic construct
  source 1..35: mol_type = other DNA
ccgggaatcggcatttcgcattcttaggatctaaa

SEQ ID NO: 4389 - DNA, 35 bp, synthetic construct
  source 1..35: mol_type = other DNA
ccgatcttcataacggacaaactgaacgggccatt

SEQ ID NO: 4390 - DNA, 35 bp, synthetic construct
  source 1..35: mol_type = other DNA
cgctatgcagacgagctggcagaggagagaaatca

SEQ ID NO: 4391 - DNA, 35 bp, synthetic construct
  source 1..35: mol_type = other DNA
cattcgcaaccatgtgaagtaatgtgagcgtactt

SEQ ID NO: 4392 - DNA, 35 bp, synthetic construct
  source 1..35: mol_type = other DNA
caccagttagcgtggcgtataccatgttgttaaca

SEQ ID NO: 4393 - DNA, 35 bp, synthetic construct
  source 1..35: mol_type = other DNA
cctgaatcaatagaacaatatcagttatggcggtg

SEQ ID NO: 4394 - DNA, 35 bp, synthetic construct
  source 1..35: mol_type = other DNA
cggttgttaatatgacaggccgctaaagacgttct

SEQ ID NO: 4395 - DNA, 35 bp, synthetic construct
  source 1..35: mol_type = other DNA
ccgtctcagatgagtgggttaatcaatcaagtatg

SEQ ID NO: 4396 - DNA, 35 bp, synthetic construct
  source 1..35: mol_type = other DNA
ctgacacattagtaacgtcggcaagcacttagtcg

SEQ ID NO: 4397 - DNA, 35 bp, synthetic construct
  source 1..35: mol_type = other DNA
cgtgaaccagattatgtatggacgcgcaatagata

SEQ ID NO: 4398 - DNA, 35 bp, synthetic construct
  source 1..35: mol_type = other DNA
catacgaaatttgagcaagcaattgaaggcttaga

SEQ ID NO: 4399 - DNA, 35 bp, synthetic construct
  source 1..35: mol_type = other DNA
ctatcagctaatagggtcggctcaacagtgtatcc

SEQ ID NO: 4400 - DNA, 35 bp, synthetic construct
  source 1..35: mol_type = other DNA
ctatcaattcgtgaccccgatcatccagtccagaa

SEQ ID NO: 4401 - DNA, 35 bp, synthetic construct
  source 1..35: mol_type = other DNA
cttgagctctaggcccaaaacgaccttaatggtca

SEQ ID NO: 4402 - DNA, 35 bp, synthetic construct
  source 1..35: mol_type = other DNA
ctagcccagatcctacgagatgagctacgtaacta

SEQ ID NO: 4403 - DNA, 35 bp, synthetic construct
  source 1..35: mol_type = other DNA
caaatgcactctatatggagggagagtagctggat

SEQ ID NO: 4404 - DNA, 35 bp, synthetic construct
  source 1..35: mol_type = other DNA
cctggtctaggtatctaattcgtgggtcgggtact

SEQ ID NO: 4405 - DNA, 35 bp, synthetic construct
  source 1..35: mol_type = other DNA
cattagctcggatgctatcagcttgcgcctattat

SEQ ID NO: 4406 - DNA, 35 bp, synthetic construct
  source 1..35: mol_type = other DNA
cacgatctgtattttgcacctttcgctatgctgag

SEQ ID NO: 4407 - DNA, 35 bp, synthetic construct
  source 1..35: mol_type = other DNA
ctgtgtccgtctatacgcatactggtccacatata

SEQ ID NO: 4408 - DNA, 35 bp, synthetic construct
  source 1..35: mol_type = other DNA
catgttggagttaacggagacccgccatcgtttac

SEQ ID NO: 4409 - DNA, 35 bp, synthetic construct
  source 1..35: mol_type = other DNA
cgctcattttgaacatacgattgcgattacggaaa

SEQ ID NO: 4410 - DNA, 35 bp, synthetic construct
  source 1..35: mol_type = other DNA
cctatgcatcatgtgcctcactaggacatcatgct

SEQ ID NO: 4411 - DNA, 35 bp, synthetic construct
  source 1..35: mol_type = other DNA
cctaaattgggaaaaaaggttttagctattgatgg

SEQ ID NO: 4412 - DNA, 35 bp, synthetic construct
  source 1..35: mol_type = other DNA
cttcagttaaaggctatcttgctccgctcgttctc

SEQ ID NO: 4413 - DNA, 35 bp, synthetic construct
  source 1..35: mol_type = other DNA
cttaaagctatccacgaatgtcaaaaatgtggttt

SEQ ID NO: 4414 - DNA, 35 bp, synthetic construct
  source 1..35: mol_type = other DNA
cccgaatgtataatgctgacgttcttgcttttggc

SEQ ID NO: 4415 - DNA, 35 bp, synthetic construct
  source 1..35: mol_type = other DNA
cctattgaagcaatcctctccccaatacttaaaaa

SEQ ID NO: 4416 - DNA, 35 bp, synthetic construct
  source 1..35: mol_type = other DNA
ctacggttaccgtctttataagtgaacaaaaccgg

SEQ ID NO: 4417 - DNA, 35 bp, synthetic construct
  source 1..35: mol_type = other DNA
ctctgtgaactgtcatcggtccgatcaattagtct

SEQ ID NO: 4418 - DNA, 35 bp, synthetic construct
  source 1..35: mol_type = other DNA
ctcccctttcccaagtaaatgtacgggaattatcg

SEQ ID NO: 4419 - DNA, 35 bp, synthetic construct
  source 1..35: mol_type = other DNA
cgctttattatgtgttcgtctaactctgtttctgt

SEQ ID NO: 4420 - DNA, 35 bp, synthetic construct
  source 1..35: mol_type = other DNA
ccgagtgcatgagctgtctttcacatgatacatcg

SEQ ID NO: 4421 - DNA, 35 bp, synthetic construct
  source 1..35: mol_type = other DNA
ctatttctgttcacggatgaaggcctatatcaatg

SEQ ID NO: 4422 - DNA, 35 bp, synthetic construct
  source 1..35: mol_type = other DNA
ccatccactttcatggaaacaataagagcagggaa

SEQ ID NO: 4423 - DNA, 35 bp, synthetic construct
  source 1..35: mol_type = other DNA
cacaaactcactactaccaacaacctcaccaaaaa

SEQ ID NO: 4424 - DNA, 35 bp, synthetic construct
  source 1..35: mol_type = other DNA
ctcatgtcctctgttaatccagcctgaatatgcca

SEQ ID NO: 4425 - DNA, 35 bp, synthetic construct
  source 1..35: mol_type = other DNA
cagaaatgtcactcccatggtggctgatatagaaa

SEQ ID NO: 4426 - DNA, 35 bp, synthetic construct
  source 1..35: mol_type = other DNA
catgtcgaaccttggataggagcgaccgattacgt

SEQ ID NO: 4427 - DNA, 35 bp, synthetic construct
  source 1..35: mol_type = other DNA
ctcaggttgttacttgaagggttcaacacgagctc

SEQ ID NO: 4428 - DNA, 35 bp, synthetic construct
  source 1..35: mol_type = other DNA
cagaagatcaaaaaacgatccctgtccatcaatac

SEQ ID NO: 4429 - DNA, 35 bp, synthetic construct
  source 1..35: mol_type = other DNA
cttaggctaccaaatgaatttaaagccagctgaaa

SEQ ID NO: 4430 - DNA, 35 bp, synthetic construct
  source 1..35: mol_type = other DNA
ccaatgcttgcagtatgtatcctgatcgtgcgtgc

SEQ ID NO: 4431 - DNA, 35 bp, synthetic construct
  source 1..35: mol_type = other DNA
cctgcattctcatggaaatgcaatggattcattcc

SEQ ID NO: 4432 - DNA, 35 bp, synthetic construct
  source 1..35: mol_type = other DNA
cctgttgcagtatcacgtaaatacctacttcgata

SEQ ID NO: 4433 - DNA, 35 bp, synthetic construct
  source 1..35: mol_type = other DNA
ctagctgttatggctattgctgaaacagcaaaatt

SEQ ID NO: 4434 - DNA, 35 bp, synthetic construct
  source 1..35: mol_type = other DNA
ccttacgacttcactgcaattgacgattcagttaa

SEQ ID NO: 4435 - DNA, 35 bp, synthetic construct
  source 1..35: mol_type = other DNA
cctcataccaatgtaaagtatagttaacgccctgt

SEQ ID NO: 4436 - DNA, 35 bp, synthetic construct
  source 1..35: mol_type = other DNA
catctccatgactgcttgagcggctggagaatctg

SEQ ID NO: 4437 - DNA, 35 bp, synthetic construct
  source 1..35: mol_type = other DNA
ctttcgccacccatataaaccccacttcgtcctca

SEQ ID NO: 4438 - DNA, 35 bp, synthetic construct
  source 1..35: mol_type = other DNA
caaggcagagcaaatgtgacactgtctatcagtac

SEQ ID NO: 4439 - DNA, 35 bp, synthetic construct
  source 1..35: mol_type = other DNA
cctacatatataggaaaagggaaggtagaagagct

SEQ ID NO: 4440 - DNA, 35 bp, synthetic construct
  source 1..35: mol_type = other DNA
ccttctggaatttcttcctttgattttgccatttt

SEQ ID NO: 4441 - DNA, 35 bp, synthetic construct
  source 1..35: mol_type = other DNA
ctcctaaggttgctgatttggttgttggagaccca

SEQ ID NO: 4442 - DNA, 35 bp, synthetic construct
  source 1..35: mol_type = other DNA
caaggcctagcctaaaggttcttgcagagcaacat

SEQ ID NO: 4443 - DNA, 35 bp, synthetic construct
  source 1..35: mol_type = other DNA
cctaattagctctaggaaacacaaccccgggattt

SEQ ID NO: 4444 - DNA, 35 bp, synthetic construct
  source 1..35: mol_type = other DNA
cttgagttatacggaacttcgcaaaagtattccct

SEQ ID NO: 4445 - DNA, 35 bp, synthetic construct
  source 1..35: mol_type = other DNA
ccatccatcaacaactgctccaacagcctttccat

SEQ ID NO: 4446 - DNA, 35 bp, synthetic construct
  source 1..35: mol_type = other DNA
ccggcacaagcagacaaaatcaacatggtcattta

SEQ ID NO: 4447 - DNA, 35 bp, synthetic construct
  source 1..35: mol_type = other DNA
cgctcacgtgatctaccctagctgaccgctaatga

SEQ ID NO: 4448 - DNA, 35 bp, synthetic construct
  source 1..35: mol_type = other DNA
ctctaacctgcatacatatggcatttagttgttca

SEQ ID NO: 4449 - DNA, 35 bp, synthetic construct
  source 1..35: mol_type = other DNA
ccttcttgaagacctatgtaaagaaacgggtcact

SEQ ID NO: 4450 - DNA, 35 bp, synthetic construct
  source 1..35: mol_type = other DNA
ccatacgcatgactacattacaacgggccaggaag

SEQ ID NO: 4451 - DNA, 35 bp, synthetic construct
  source 1..35: mol_type = other DNA
caggtctcgatctcgtacaaaacgactatgaccat

SEQ ID NO: 4452 - DNA, 35 bp, synthetic construct
  source 1..35: mol_type = other DNA
catgaacgtgtcgtgttatgcagcggtatgtcgtg

SEQ ID NO: 4453 - DNA, 35 bp, synthetic construct
  source 1..35: mol_type = other DNA
cgtcgtgtcttagacgactgtgtgtgattctcgag

SEQ ID NO: 4454 - DNA, 35 bp, synthetic construct
  source 1..35: mol_type = other DNA
ccaccgttttgccagttccaccagtaactgtaagg

SEQ ID NO: 4455 - DNA, 35 bp, synthetic construct
  source 1..35: mol_type = other DNA
cgccctggaacaacggttatattctctggcagaac

SEQ ID NO: 4456 - DNA, 38 bp, synthetic construct
  source 1..38: mol_type = other DNA
ccccccgaatcacatgacttgggcgggggtcgtttttt

SEQ ID NO: 4457 - DNA, 38 bp, synthetic construct
  source 1..38: mol_type = other DNA
accggatagcggttggaggcgtgctccactcgtttttt

SEQ ID NO: 4458 - DNA, 20 bp, synthetic construct
  source 1..20: mol_type = other DNA
  modified_base 1: mod_base = OTHER; note = nucleotide conjugated to a carboxylated microsphere
acgtaagtatatctgtacaa

SEQ ID NO: 4459 - protein, 13 aa, Homo sapiens
  SITE 7: note = Oxidation
KGEQGEPGAPGIR

1-135. (canceled)

136. A method of generating a personalized multipartite construct for a subject, comprising:
a) contacting a biological sample from the subject with an oligonucleotide probe library;
b) identifying members of the probe library that bind to the biological sample upon contact in a); and
c) synthesizing a multipartite construct, wherein the multipartite construct comprises a first segment and a second segment, wherein the first segment comprises one or more members of the probe library identified in b), thereby generating a personalized multipartite construct for the subject.

137. The method of claim 136, wherein the first segment binds to a cancer antigen, a tumor antigen, a cell surface antigen, a microvesicle surface antigen, a cell receptor and/or a membrane antigen.

138. The method of claim 136, wherein the first segment binds to a target selected from the group consisting of CD2, CD4, CD19, CD20, CD22, CD23, CD30, CD33, CD37, CD40, CD44v6, CD52, CD56, CD70, CD74, CD79a, CD80, CD98, CD138, EGFR (Epidermal growth factor receptor), VEGF (Vascular endothelial growth factor), VEGFR1 (Vascular endothelial growth factor receptor 1), PDGFR (Platelet-derived growth factor receptor), RANKL (Receptor activator of nuclear factor kappa-B ligand), GPNMB (Transmembrane glycoprotein Neuromedin B), EphA2 (Ephrin type-A receptor 2), PSMA (Prostate-specific membrane antigen), Cripto (Cryptic family protein 1B), EpCAM (Epithelial cell adhesion molecule), CTLA4 (Cytotoxic T-Lymphocyte Antigen 4), IGF-IR (Type 1 insulin-like growth factor receptor), GP3 (M13 bacteriophage), GP9 (Glycoprotein IX), CD42a, GP 40 (Glycoprotein 40 kDa), GPC3 (glypican-3), GPC1 (glypican-1), TRAILR1 (Tumor necrosis factor-related apoptosis-inducing ligand receptor 1), TRAILR1I (Tumor necrosis factor-related apoptosis-inducing ligand receptor II), FAS (Type II transmembrane protein), PS (phosphatidyl serine) lipid, Muc1 (Mucin 1, PEM), Muc18, CD146, α5β1 integrin, α4β1 integrin, av integrin (Vitronectin Receptor), Chondrolectin, CAIX (Carbonic anhydrase IX), GD2 gangloside, GD3 gangloside, GM1 gangloside, Lewis Y antigen, Mesothelin, HER2 (Human Epidermal Growth factor 2), HER3, HER4, FN14 (Fibroblast Growth Factor Inducible 14), CS1 (Cell surface glycoprotein, CD2 subset 1, CRACC, SLAMF7, CD319), 41BB CD137, SIP (Siah-1 Interacting Protein), CTGF (Connective tissue growth factor), HLADR (MHC class II cell surface receptor), PD-1 (Programmed Death 1, Type I membrane protein, PD-L1 (Programmed Death Ligand 1), PD-L2 (Programmed Death Ligand 2), IL-2 (Interleukin-2), IL-8 (Interleukin-8), IL-13 (Interleukin-13), PIGF (Phosphatidylinositol-glycan biosynthesis class F protein), NRP1 (Neuropilin-1), ICAM1, CD54, GC182 (Claudin 18.2), Claudin, HGF (Hepatocyte growth factor), CEA (Carcinoembryonic antigen), LTβR (lymphotoxin β receptor), Kappa Myeloma, Folate Receptor alpha, GRP78 (BIP, 78 kDa Glucose-regulated protein), A33 antigen, PSA (Prostate-specific antigen), CA 125 (Cancer antigen 125 or carbohydrate antigen 125), CA19.9, CA15.3, CA242, leptin, prolactin, osteopontin, IGF-II (Insulin-like growth factor 2), fascin, sPIgR (secreted chain of polymorphic immunoglobulin receptor), 14-3-3 eta protein, 5T4, ETA (epithelial tumor antigen), MAGE (Melanoma-associated antigen), MAPG (Melanoma-associated proteoglycan, NG2), vimentin, EPCA-1 (Early prostate cancer antigen-2), TAG-72 (Tumor-associated glycoprotein 72), factor VIII, Neprilysin (Membrane metallo-endopeptidase), 17-1 A (Epithelial cell surface antigen 17-1A), nucleolin, nucleophosmin, and any combination thereof.

139. The method of claim 136, wherein the first segment comprises more than 10 members of the probe library identified in b).

140. The method of claim 136, wherein the second segment comprises a peptide or an oligonucleotide.

141. The method of claim 136, wherein the second segment binds to an immunomodulatory molecule.

142. The method of claim 136, wherein the second segment binds to a member of the innate immune system, a member of the complement system, C1q, C1r, C1s, C1, C3a, C3b, C3d, C5a, C2, C4, and any combination thereof.

143. The method of claim 136, wherein the multipartite construct further comprises a linker region between the first segment and second segment.

144. The method of claim 136, wherein the multipartite construct further comprises an immunostimulating moiety and/or a membrane disruptive moiety.

145. The method of claim 136, wherein the multipartite construct is flanked by a first oligonucleotide primer region and a second oligonucleotide primer region.

146. The method of claim 136, wherein the biological sample comprises a biopsy sample, a tissue removed during a surgical procedure, a bodily fluid, a frozen section, a cell, a cell culture, or a fraction, derivative or component of any thereof.

147. The method of claim 136, wherein the multipartite construct comprises at least one oligonucleotide chemical modification.

148. The method of claim 147, wherein the modification is selected from the group consisting: of a chemical substitution at a sugar position; a chemical substitution at a phosphate position; and a chemical substitution at a base position of the nucleic acid.

149. The method of claim 147, wherein the modification is selected from the group consisting of incorporation of a modified nucleotide, 3′ capping, conjugation to an amine linker, conjugation to a high molecular weight, non-immunogenic compound, conjugation to a lipophilic compound, conjugation to a drug, conjugation to a cytotoxic moiety and labeling with a radioisotope.

150. The method of claim 136, further comprising,
d) administering a therapeutically effective amount of the multipartite construct to the subject.

151. The method of claim 150, wherein the administering comprises at least one of intradermal, intramuscular, intraperitoneal, intravenous, subcutaneous, intranasal, epidural, oral, sublingual, intracerebral, intravaginal, transdermal, rectal, by inhalation, topical administration, or any combination thereof.

152. The method of claim 150, wherein the disease or disorder comprises a cancer, a premalignant condition, an inflammatory disease, an immune disease, an autoimmune disease or disorder, a cardiovascular disease or disorder, neurological disease or disorder, infectious disease or pain, wherein the cancer comprises an acute lymphoblastic leukemia; acute myeloid leukemia; adrenocortical carcinoma; AIDS-related cancers; AIDS-related lymphoma; anal cancer; appendix cancer; astrocytomas; atypical teratoid/rhabdoid tumor; basal cell carcinoma; bladder cancer; brain stem glioma; brain tumor (including brain stem glioma, central nervous system atypical teratoid/rhabdoid tumor, central nervous system embryonal tumors, astrocytomas, craniopharyngioma, ependymoblastoma, ependymoma, medulloblastoma, medulloepithelioma, pineal parenchymal tumors of intermediate differentiation, supratentorial primitive neuroectodermal tumors and pineoblastoma); breast cancer; bronchial tumors; Burkitt lymphoma; cancer of unknown primary site; carcinoid tumor; carcinoma of unknown primary site; central nervous system atypical teratoid/rhabdoid tumor; central nervous system embryonal tumors; cervical cancer; childhood cancers; chordoma; chronic lymphocytic leukemia; chronic myelogenous leukemia; chronic myeloproliferative disorders; colon cancer; colorectal cancer; craniopharyngioma; cutaneous T-cell lymphoma; endocrine pancreas islet cell tumors; endometrial cancer; ependymoblastoma; ependymoma; esophageal cancer; esthesioneuroblastoma; Ewing sarcoma; extracranial germ cell tumor; extragonadal germ cell tumor; extrahepatic bile duct cancer; gallbladder cancer; gastric (stomach) cancer; gastrointestinal carcinoid tumor; gastrointestinal stromal cell tumor; gastrointestinal stromal tumor (GIST); gestational trophoblastic tumor; glioma; hairy cell leukemia; head and neck cancer; heart cancer; Hodgkin lymphoma; hypopharyngeal cancer; intraocular melanoma; islet cell tumors; Kaposi sarcoma; kidney cancer; Langerhans cell histiocytosis; laryngeal cancer; lip cancer; liver cancer; lung cancer; malignant fibrous histiocytoma bone cancer; medulloblastoma; medulloepithelioma; melanoma; Merkel cell carcinoma; Merkel cell skin carcinoma; mesothelioma; metastatic squamous neck cancer with occult primary; mouth cancer; multiple endocrine neoplasia syndromes; multiple myeloma; multiple myeloma/plasma cell neoplasm; mycosis fungoides; myelodysplastic syndromes; myeloproliferative neoplasms; nasal cavity cancer; nasopharyngeal cancer; neuroblastoma; Non-Hodgkin lymphoma; nonmelanoma skin cancer; non-small cell lung cancer; oral cancer; oral cavity cancer; oropharyngeal cancer; osteosarcoma; other brain and spinal cord tumors; ovarian cancer; ovarian epithelial cancer; ovarian germ cell tumor; ovarian low malignant potential tumor; pancreatic cancer; papillomatosis; paranasal sinus cancer; parathyroid cancer; pelvic cancer; penile cancer; pharyngeal cancer; pineal parenchymal tumors of intermediate differentiation; pineoblastoma; pituitary tumor; plasma cell neoplasm/multiple myeloma; pleuropulmonary blastoma; primary central nervous system (CNS) lymphoma; primary hepatocellular liver cancer; prostate cancer; rectal cancer; renal cancer; renal cell (kidney) cancer; renal cell cancer; respiratory tract cancer; retinoblastoma; rhabdomyosarcoma; salivary gland cancer; Sézary syndrome; small cell lung cancer; small intestine cancer; soft tissue sarcoma; squamous cell carcinoma; squamous neck cancer; stomach (gastric) cancer; supratentorial primitive neuroectodermal tumors; T-cell lymphoma; testicular cancer; throat cancer; thymic carcinoma; thymoma; thyroid cancer; transitional cell cancer; transitional cell cancer of the renal pelvis and ureter; trophoblastic tumor; ureter cancer; urethral cancer; uterine cancer; uterine sarcoma; vaginal cancer; vulvar cancer; Waldenström macroglobulinemia; or Wilms' tumor.
